(19) United States
(12) Patent Application Publication
(10) Pub. No.: US 2009/0044288 A1
(43) Pub. Date: Feb. 12, 2009

(54) Transgenic plants with enhanced agrnomic traits

(76) Inventors: Mark Abad, Webster Groves, MO (US); Murtaza Alibhai, San Carlos, CA (US); Alice Clara Augustine, Bangalore (IN); Amarjit Basra, Chesterfield, MO (US); Erin Bell, St. Louis, MO (US); Terry L. Bradshaw, Mebane, NC (US); Paolo Castiglioni, Davis, CA (US); Jaishree M. Chittoor-Vijayanath, Wildwood, MO (US); Jill Deikman, Davis, CA (US); Molian Deng, Grover, MO (US); Michael D. Edgerton, St. Louis, MO (US); Karen K. Gabbert, St. Louis, MO (US); Barry S. Goldman, St. Louis, MO (US); Balasulojini Karunanandaa, Creve Coeur, MO (US); Susanne Kjemtrup-Lovelace, Chapel Hill, NC (US); Timothy J. Leland, St. Charles, MO (US); Adrian A. Lund, Chesterfield, MO (US); Linda Lutfiyya, St. Louis, MO (US); Marcus McNabnay, Edwardsville, IL (US); Donald E. Nelson, Stonington, CT (US); Thomas G. Ruff, Wildwood, MO (US); Beth Savidge, Davis, CA (US); Paul Schaffer, Stonington, CT (US); Padmini Sudarshana, Bangalore (IN); K. Sumathy, Secunderabad (IN); Carolyn Thai, O'Fallon, MO (US); Rebecca L. Thompson-Mize, St. Charles, MO (US); Carl P. Urwin, Dardenne Prairie, MO (US); H.G. Veena, Toernooiveld 1 (NL); T.V. Venkatesh, St. Louis, MO (US); Steven T. Voss, Edwardsville, IL (US); Zhidong Xie, Maryland Heights, MO (US)

Correspondence Address: MONSANTO COMPANY, 800 N. LINDBERGH BLVD., ATTENTION: GAIL P. WUELLNER, IP PARALEGAL, (E2NA), ST. LOUIS, MO, 63167, US

(21) Appl. No.: 12/218,975

(22) Filed: Jul. 18, 2008

Related U.S. Application Data
(60) Provisional application No. 60/961,192, filed on Jul. 19, 2007.

(51) Int. Cl. C12N 15/11; C12N 5/10; A01H 5/00; A01H 1/02; C12Q 1/68

(52) U.S. Cl. 800/264; 435/419; 536/24.1; 435/418; 800/298; 800/320.1; 800/312; 800/314; 800/306; 800/320; 800/320.2; 800/320.3; 800/260; 800/275; 435/6

(57) ABSTRACT

This invention provides transgenic plant cells with recombinant DNA for expression of proteins that are useful for imparting enhanced agronomic trait(s) to transgenic crop plants. This invention also provides transgenic plants and progeny seed comprising the transgenic plant cells where the plants are selected for having an enhanced trait selected from the group of traits consisting, of enhanced water use efficiency, enhanced cold tolerance, increased yield, enhanced nitrogen use efficiency, enhanced seed protein and enhanced seed oil. Also disclosed are methods for manufacturing transgenic seed and plants with enhanced trait.

### CROSS REFERENCE TO RELATED APPLICATIONS

[0001] This application claims benefit under 35USC § 119(e) of U.S. provisional application Ser. No. 60/961,192, filed Jul. 19, 2007 herein incorporated by reference in its entirety.

### INCORPORATION OF SEQUENCE LISTING

[0002] Two copies of the sequence listing (Copy 1 and Copy 2) and a computer readable form (CRF) of the sequence listing, all on CD-Rs, each containing the text file named 38-21(54147)A_seqlisting.txt, which is 6,903,808 bytes (measured in MS-WINDOWS), were created on Jul. 16, 2008 and are herein incorporated by reference.

### INCORPORATION OF COMPUTER PROGRAM LISTING

[0003] Two copies of the Computer Program Listing (Copy 1 and Copy 2) and a computer readable form (CRF) containing folders hmmer-2.3.2 and 32 pfamDir, all on CD-Rs are incorporated herein by reference in their entirety. Folder hmmer-2.3.2 contains the source code and other associated file for implementing the HMMer software for Pfam analysis. Folder 32 pfamDir contains 32 Pfam Hidden Markov Models. Both folders were created on CD-R on Jul. 16, 2008, having a total size of 5,257,216 (measured in MS-WINDOWS).

### FIELD OF THE INVENTION

[0004] Disclosed herein are recombinant DNA useful for providing enhanced traits to transgenic plants, seeds, pollen, plant cells and plant nuclei of such transgenic plants, methods of making and using such recombinant DNA, plants, seeds, pollen, plant cells and plant nuclei. Also disclosed are methods of producing hybrid seed comprising such recombinant DNA.

### BACKGROUND OF THE INVENTION

[0005] This invention employs recombinant DNA for expression of proteins that are useful for imparting enhanced agronomic traits to transgenic plants. Recombinant DNA in this invention is provided in a construct comprising a promoter that is functional in plant cells and that is operably linked to a DNA segment that encodes a protein. In some embodiments of the invention, such protein defined by protein domains e.g. a “Pfam domain module” (as defined herein below) from the group of Pfam domain modules identified in Table 10. In other embodiments of the invention, e.g. where a Pfam domain module is not available, such protein is defined a consensus amino acid sequence of an encoded protein that is targeted for production e.g. a protein having amino acid sequence with at least 90% identity to a consensus amino acid sequence as set forth in SEQ ID NO: 2201. In more specific embodiments of the invention the protein expressed in plant cells is a protein selected from the group of proteins identified in Table 1 and their homologs identified in Table 8.

[0006] Other aspects of the invention are specifically directed to plant cell nuclei and transgenic plant cells comprising the recombinant DNA construct of the invention, transgenic plants comprising a plurality of such plant cells, progeny transgenic seed, embryo and transgenic pollen from such transgenic plants. Such transgenic plants are selected from a population of transgenic plants regenerated from plant cells transformed with the recombinant DNA construct provided by the invention and express the protein by screening transgenic plants in the population for an enhanced trait as compared to control plants that do not have the recombinant DNA construct, where the enhanced trait is selected from group of enhanced traits consisting of enhanced water use efficiency, enhanced cold tolerance, increased yield, enhanced nitrogen use efficiency, enhanced seed protein and enhanced seed oil.

[0007] In yet another aspect of the invention the plant cell nuclei, plant cells, transgenic plants, seeds, and pollen further comprise recombinant DNA expressing a protein that provides tolerance from exposure to an herbicide applied at levels that are lethal to a wild type plant cell. Such tolerance is especially useful not only as an advantageous trait in such plants but is also useful in a selection step in the methods of the invention. In aspects of the invention such herbicide is a glyphosate, dicamba, or glufosinate compound.

[0008] Yet other aspects of the invention provide transgenic plants which are homozygous for the recombinant DNA and transgenic seed of the invention from corn, soybean, cotton, canola, alfalfa, wheat or rice plants.

[0009] This invention also provides methods for manufacturing non-natural, transgenic seed that can be used to produce a crop of transgenic plants with an enhanced trait resulting from expression of stably-integrated, recombinant DNA construct provided by herein. More specifically the method comprises (a) providing a population of plants produced from a parental plant having a recombinant DNA construct of the invention; (b) screening this population of plants for at least one enhanced trait and the recombinant DNA construct, where individual plants in the population can exhibit the trait at a level less than, essentially the same as or greater than the level that the trait is exhibited in control plants which do not contain the recombinant DNA construct, where the enhanced trait is selected from the group of enhanced traits consisting, of enhanced water use efficiency, enhanced cold tolerance, enhanced heat tolerance, enhanced high salinity tolerance, enhanced shade tolerance, increased yield, enhanced nitrogen use efficiency, enhanced seed protein and enhanced seed oil; (c) selecting from the population one or more plants that exhibit the trait at a level greater than the level that the trait is exhibited in control plants; and (d) collecting seeds from selected plant selected from step c. The method further comprises (e) verifying that the recombinant DNA construct is stably integrated in said selected plants, and (f) analyzing tissue of a selected plant to determine the production of a protein having the function of a protein selected from SEQ ID NO: 96 through SEQ ID NO: 2166. In one aspect of the invention the plants in the population further comprise DNA expressing a protein that provides tolerance to exposure to a herbicide applied at levels that are lethal to wild type plant cells and the selecting is affected by treating the population with the herbicide, e.g. a glyphosate, dicamba, or glufosinate compound. In another aspect of the invention the plants are selected by identifying plants with the enhanced trait. The methods are especially useful for manufacturing corn, soybean, cotton, canola, alfalfa, wheat or rice seed.

[0010] Another aspect of the invention provides a method of producing hybrid corn seed comprising acquiring hybrid corn seed from a herbicide tolerant corn plant which also has stably-integrated, recombinant DNA construct comprising a promoter that is (a) functional in plant cells and (b) is operably linked to DNA that encodes a protein provided by the invention. The methods further comprise producing corn plants from the hybrid corn seed, wherein a fraction of the plants produced from the hybrid corn seed is homozygous for the recombinant DNA, a fraction of the plants produced from the hybrid corn seed is hemizygous for the recombinant DNA construct, and a fraction of the plants produced from the hybrid corn seed has none of the recombinant DNA construct; selecting corn plants which are homozygous and hemizygous for the recombinant DNA construct by treating with an herbicide; collecting seed from herbicide-treated-surviving corn plants and planting the seed to produce further progeny corn plants; repeating the selecting and collecting steps at least once to produce an inbred corn line; and crossing the inbred corn line with a second corn line to produce hybrid seed.

### BRIEF DESCRIPTION OF THE DRAWINGS

[0011] FIG. 1 is a consensus amino acid sequence of SEQ ID NO: 127 and its homologs.

[0012] FIGS. 2-5 are plasmid maps.

### DETAILED DESCRIPTION OF THE INVENTION

[0013] In the attached sequence listing:

[0014] SEQ ID NO: 1-95 are nucleotide sequences of the coding strand of DNA for “genes” used in the recombinant DNA imparting an enhanced trait in plant cells, i.e. each represents a coding sequence for a protein;

[0015] SEQ ID NO: 96-193 are amino acid sequences of the cognate protein of the “genes” with nucleotide coding sequences 1-95;

[0016] SEQ ID NO: 194-2166 are amino acid sequences of homologous proteins;

[0017] SEQ ID NO: 2167-2200 are nucleotide sequences of the elements in base plasmid vectors SEQ ID NO: 2201 is a consensus amino acid sequence.

[0018] SEQ ID NO: 2202-2203 are nucleotide sequences of two base plasmid vectors useful for corn transformation;

[0019] SEQ ID NO: 2204 is a nucleotide sequence of a base plasmid vector useful for soybean and canola transformation; and

[0020] SEQ ID NO: 2205 is a nucleotide sequence of a base plasmid vector useful for cotton transformation.

[0021] As used herein a “plant cell” means a plant cell that is transformed with stably-integrated, non-natural, recombinant DNA, e.g. by Agrobacterium-mediated transformation or by bombardment using microparticles coated with recombinant DNA or other means. A plant cell of this invention can be an originally-transformed plant cell that exists as a microorganism or as a progeny plant cell that is regenerated into differentiated tissue, e.g. into a transgenic plant with stably-integrated, non-natural recombinant DNA, or seed or pollen derived from a progeny transgenic plant.

[0022] As used herein a “transgenic plant” means a plant whose genome has been altered by the stable integration of recombinant DNA. A transgenic plant includes a plant regenerated from an originally-transformed plant cell and progeny transgenic plants from later generations or crosses of a transformed plant.

[0023] As used herein “recombinant DNA” means DNA which has been genetically engineered and constructed outside of a cell including DNA containing naturally occurring DNA or cDNA or synthetic DNA.

[0024] As used herein “consensus sequence” means an artificial sequence of amino acids in a conserved region of an alignment of amino acid sequences of homologous proteins, e.g. as determined by a CLUSTALW alignment of amino acid sequence of homolog proteins.

[0025] As used herein “homolog” means a protein in a group of proteins that perform the same biological function, e.g. proteins that belong to the same Pfam protein family and that provide a common enhanced trait in transgenic plants of this invention. Homologs are expressed by homologous genes. Homologous genes include naturally occurring alleles and artificially-created variants. Degeneracy of the genetic code provides the possibility to substitute at least one base of the protein encoding sequence of a gene with a different base without causing the amino acid sequence of the polypeptide produced from the gene to be changed. Hence, a polynucleotide useful in the present invention may have any base sequence that has been changed from SEQ ID NO: 1 through SEQ ID NO: 95 in accordance with degeneracy of the genetic code. Homologs are proteins that, when optimally aligned, have at least 60% identity, more preferably about 70% or higher, more preferably at least 80% and even more preferably at least 90% identity over the full length of a protein identified as being associated with imparting an enhanced trait when expressed in plant cells. Homologs include proteins with an amino acid sequence that has at least 90% identity to a consensus amino acid sequence of proteins and homologs disclosed herein.

[0026] Homologs are identified by comparison of amino acid sequence, e.g. manually or by use of a computer-based tool using known homology-based search algorithms such as those commonly known and referred to as BLAST, FASTA, and Smith-Waterman. A local sequence alignment program, e.g. BLAST, can be used to search a database of sequences to find similar sequences, and the summary Expectation value (E-value) used to measure the sequence base similarity. As a protein hit with the best E-value for a particular organism may not necessarily be an ortholog or the only ortholog, a reciprocal query is used in the present invention to filter hit sequences with significant E-values for ortholog identification. The reciprocal query entails search of the significant hits against a database of amino acid sequences from the base organism that are similar to the sequence of the query protein. A hit is a likely ortholog, when the reciprocal query's best hit is the query protein itself or a protein encoded by a duplicated gene after speciation. A further aspect of the invention comprises functional homolog proteins that differ in one or more amino acids from those of disclosed protein as the result of conservative amino acid substitutions, for example substitutions are among: acidic (negatively charged) amino acids such as aspartic acid and glutamic acid; basic (positively charged) amino acids such as arginine, histidine, and lysine; neutral polar amino acids such as glycine, serine, threonine, cysteine, tyrosine, asparagine, and glutamine; neutral nonpolar (hydrophobic) amino acids such as alanine, leucine, isoleucine, valine, proline, phenylalanine, tryptophan, and methionine; amino acids having aliphatic side chains such as glycine, alanine, valine, leucine, and isoleucine; amino acids having aliphatic-hydroxyl side chains such as serine and threonine; amino acids having amide-containing side chains such as asparagine and glutamine; amino acids having aromatic side chains such as phenylalanine, tyrosine, and tryptophan; amino acids having basic side chains such as lysine, arginine, and histidine; amino acids having sulfur-containing side chains such as cysteine and methionine; naturally conservative amino acids such as valine-leucine, valine-isoleucine, phenylalanine-tyrosine, lysine-arginine, alanine-valine, aspartic acid-glutamic acid, and asparagine-glutamine. A further aspect of the homologs encoded by DNA useful in the transgenic plants of the invention are those proteins that differ from a disclosed protein as the result of deletion or insertion of one or more amino acids in a native sequence.

[0027] “Percent identity” describes the extent to which the sequences of DNA or protein segments are invariant throughout a window of alignment of nucleotide or amino acid sequences. An “identity fraction” for a sequence aligned with a reference sequence is the number of identical components which are shared by the sequences, divided by a length of the window of alignment, wherein the length does not include gaps introduced by an alignment algorithm. “Percent identity” (% identity) is the identity fraction times 100. The alignment algorithm is preferably a local alignment algorithm, such as BLASTp. As used herein, sequences are “aligned” when the alignment produced by BLASTp has a minimal e-value.

[0028] “Pfam” database is a large collection of multiple sequence alignments and hidden Markov models covering many common protein families, e.g. Pfam version 19.0 (December 2005) contains alignments and models for 8183 protein families and is based on the Swissprot 47.0 and SP-TrEMBL 30.0 protein sequence databases. See S. R. Eddy, “Profile Hidden Markov Models”, Bioinformatics 14:755-763, 1998. The Pfam database is currently maintained and updated by the Pfam Consortium. The alignments represent some evolutionary conserved structure that has implications for the protein's function. Profile hidden Markov models (profile HMMs) built from the protein family alignments are useful for automatically recognizing that a new protein belongs to an existing protein family even if the homology by alignment appears to be low.

[0029] Protein domains are identified by querying the amino acid sequence of a protein against Hidden Markov Models which characterize protein family domains (“Pfam domains”) using HMMER software, a current version of which is provided in the appended computer listing. A protein domain meeting the gathering cutoff for the alignment of a particular Pfam domain is considered to contain the Pfam domain.

[0030] A “Pfam domain module” is a representation of Pfam domains in a protein, in order from N terminus to C terminus. In a Pfam domain module individual Pfam domains are separated by double colons “::”. The order and copy number of the Pfam domains from N to C terminus are attributes of a Pfam domain module. Although the copy number of repetitive domains is important, varying copy number often enables a similar function. Thus, a Pfam domain module with multiple copies of a domain should define an equivalent Pfam domain module with variance in the number of multiple copies. A Pfam domain module is not specific or distance between adjacent domains, but contemplates natural distances and variations in distance that provide equivalent function. The Pfam database contains both narrowly- and broadly-defined domains, leading to identification of over-lapping domains on some proteins. A Pfam domain module is characterized by non-over-lapping domains. Where there is overlap, the domain having a function that is more closely associated with the function of the protein (based on the E value of the Pfam match) is selected. One protein is identified as containing a pfam domain when its scores is higher than the gathering cutoff disclosed in Table 12 by Pfam analysis disclosed herein

[0031] Once one DNA is identified as encoding a protein which imparts an enhanced trait when expressed in transgenic plants, other DNA encoding proteins with the same Pfam domain module are identified by querying the amino acid sequence of protein encoded by candidate DNA against the Hidden Markov Models which characterizes the Pfam domains using HMMER software. Candidate proteins meeting the same Pfam domain module are in the protein family and have cognate DNA that is useful in constructing recombinant DNA for the use in the plant cells of this invention. Hidden Markov Model databases for use with HMMER software in identifying DNA expressing protein with a common Pfam domain module for recombinant DNA in the plant cells of this invention are also included in the appended computer listing.

[0032] The HMMER software and Pfam databases are version 19.0 and were used to identify known domains in the proteins corresponding to amino acid sequence of SEQ ID NO: 96 through SEQ ID NO: 193. All DNA encoding proteins that have at least one of pfam domain modules of this invention can be used in recombinant DNA construct of this invention, e.g. for selecting transgenic plants having enhanced agronomic traits. The relevant Pfams modules for use in this invention, as more specifically disclosed below, are Homeobox, Myb_DNA-binding::Myb_DNA-binding, Myb_DNA-binding, zf-Dof, zf-C2H2::zf-C2H2, AP2, Response_reg::Myb_DNA-binding, B3, B3::Auxin_resp::AUX_IAA, HLH, NAM, B3::B3, AUX_IAA, KNOX1::KNOX2::ELK, GRAS, AT_hook::AT_HOOK::DUF296, TCP, SBP, zf-C2H2, B3::Auxin_resp, EIN3, bZIP_{—}2, zf-B_box::zf-B_box, zf-B_box::CCT, RWP-RK::PB1, F-box::TUB, CBFD_NFYB_HMF, GATA, SRF-TF, K-box, and SRF-TF::K-box.

[0033] As used herein “promoter” means regulatory DNA for initializing transcription. A “plant promoter” is a promoter capable of initiating transcription in plant cells whether or not its origin is a plant cell, e.g. it is well known that Agrobacterium promoters are functional in plant cells. Thus, plant promoters include promoter DNA obtained from plants, plant viruses and bacteria such as Agrobacterium and Bradyrhizobium bacteria. Examples of promoters under developmental control include promoters that preferentially initiate transcription in certain tissues, such as leaves, roots, or seeds. Such promoters are referred to as “tissue preferred”. Promoters that initiate transcription only in certain tissues are referred to as “tissue specific”. A “cell type” specific promoter primarily drives expression in certain cell types in one or more organs, for example, vascular cells in roots or leaves. An “inducible” or “repressible” promoter is a promoter which is under environmental control. Examples of environmental conditions that may affect transcription by inducible promoters include anaerobic conditions, or certain chemicals, or the presence of light. Tissue specific, tissue preferred, cell type specific, and inducible promoters constitute the class of “non-constitutive” promoters. A “constitutive” promoter is a promoter which is active under most conditions.

[0034] As used herein “operably linked” means the association of two or more DNA fragments in a DNA construct so that the function of one, e.g. protein-encoding DNA, is controlled by the other, e.g. a promoter.

[0035] As used herein “expressed” means produced, e.g. a protein is expressed in a plant cell when its cognate DNA is transcribed to mRNA that is translated to the protein.

[0036] As used herein a “control plant” means a plant that does not contain the recombinant DNA that expresses a protein that imparts an enhanced trait. A control plant is to identify and select a transgenic plant that has an enhance trait. A suitable control plant can be a non-transgenic plant of the parental line used to generate a transgenic plant, i.e. devoid of recombinant DNA. A suitable control plant may in some cases be a progeny of a hemizygous transgenic plant line that is does not contain the recombinant DNA, known as a negative segregant.

[0037] As used herein an “enhanced trait” means a characteristic of a transgenic plant that includes, but is not limited to, an enhance agronomic trait characterized by enhanced plant morphology, physiology, growth and development, yield, nutritional enhancement, disease or pest resistance, or environmental or chemical tolerance. In more specific aspects of this invention enhanced trait is selected from group of enhanced traits consisting of enhanced water use efficiency, enhanced cold tolerance, increased yield, enhanced nitrogen use efficiency, enhanced seed protein and enhanced seed oil. In an important aspect of the invention the enhanced trait is enhanced yield including increased yield under non-stress conditions and increased yield under environmental stress conditions. Stress conditions may include, for example, drought, shade, fungal disease, viral disease, bacterial disease, insect infestation, nematode infestation, cold temperature exposure, heat exposure, osmotic stress, reduced nitrogen nutrient availability, reduced phosphorus nutrient availability and high plant density. “Yield” can be affected by many properties including without limitation, plant height, pod number, pod position on the plant, number of internodes, incidence of pod shatter, grain size, efficiency of nodulation and nitrogen fixation, efficiency of nutrient assimilation, resistance to biotic and abiotic stress, carbon assimilation, plant architecture, resistance to lodging, percent seed germination, seedling vigor, and juvenile traits. Yield can also be affected by efficiency of germination (including germination in stressed conditions), growth rate (including growth rate in stressed conditions), ear number, seed number per ear, seed size, composition of seed (starch, oil, protein) and characteristics of seed fill.

[0038] Increased yield of a transgenic plant of the present invention can be measured in a number of ways, including test weight, seed number per plant, seed weight, seed number per unit area (i.e. seeds, or weight of seeds, per acre), bushels per acre, tones per acre, tons per acre, kilo per hectare. For example, maize yield may be measured as production of shelled corn kernels per unit of production area, for example in bushels per acre or metric tons per hectare, often reported on a moisture adjusted basis, for example at 15.5 percent moisture. Increased yield may result from improved utilization of key biochemical compounds, such as nitrogen, phosphorous and carbohydrate, or from improved responses to environmental stresses, such as cold, heat, drought, salt, and attack by pests or pathogens. Recombinant DNA used in this invention can also be used to provide plants having improved growth and development, and ultimately increased yield, as the result of modified expression of plant growth regulators or modification of cell cycle or photosynthesis pathways. Also of interest is the generation of transgenic plants that demonstrate enhanced yield with respect to a seed component that may or may not correspond to an increase in overall plant yield. Such properties include enhancements in seed oil, seed molecules such as tocopherol, protein and starch, or oil particular oil components as may be manifest by alterations in the ratios of seed components.

[0039] A subset of the DNA molecules of this invention includes fragments of the disclosed recombinant DNA consisting of oligonucleotides of at least 15, preferably at least 16 or 17, more preferably at least 18 or 19, and even more preferably at least 20 or more, consecutive nucleotides. Such oligonucleotides are fragments of the largely molecules having a sequence selected from the group consisting of SEQ ID NO: 1 through SEQ ID NO: 95, and find use, for example as probes and primers or detection of the polynucleotides of the present invention.

[0040] Recombinant DNA constructs are assembled using methods well known to persons of ordinary skill in the art and typically comprise a promoter operably linked to DNA, the expression of which provides the enhanced agronomic trait. Other constrict components may include additional regulatory elements, such as 5′ leaders and atoms for enhancing transcription, 3′ untranslated regions (such as polyadenylation signals and sites), DNA for transit or signal peptides.

[0041] Numerous promoters that are active in plant cells have been described in the literature. These include promoters present in plant genomes as well as promoters from other sources, including nopaline synthase (NOS) promote and octopine synthase (OCS) promoters carried on tumor-inducing plasmids of Agrobacterium tumefaciens and the CaMV35S promoters from the cauliflower mosaic virus as disclosed in U.S. Pat. Nos. 5,164,316 and 5,322,938. Useful promoters derived from plant genes are found in U.S. Pat. No. 5,641,876, which discloses a rice actin promoter, U.S. Pat. No. 7,151,204, which discloses a maize chloroplast aldolase promoter and a maize aldolase (FDA) promoter, and U.S. Patent Application Publication 2003/0131377 A1, which discloses a maize nicotianamine synthase promoter, all of which are incorporated herein by reference. These and numerous other promoters that function in plant cells are known to those skilled in the art and available for use in recombinant polynucleotides of the present invention to provide for expression of desired genes in transgenic plant cells.

[0042] In other aspects of the invention, preferential expression in plant green tissues is desired. Promoters of interest for such uses include those from genes such as Arabidopsis thaliana ribulose-1,5-bisphosphate carboxylase (Rubisco) small subunit (Fischhoff et al. (1992) Plant Mol Biol. 20:81-93), aldolase and pyruvate orthophosphate dikinase (PPDK) (Taniguchi et al. (2000) Plant Cell Physiol. 41(1):42-48).

[0043] Furthermore, the promoters may be altered to contain multiple “enhancer sequences” to assist in elevating gene expression. Such enhancers are known in the art. By including an enhancer sequence with such constructs, the expression of the selected protein may be enhanced. These enhancers often are found 5′ to the start of transcription in a promoter that functions in eukaryotic cells, but can often be inserted upstream (5′) or downstream (3′) to the coding sequence. In some instances, these 5′ enhancing elements are introns. Particularly useful as enhancers are the 5′ introns of the rice actin 1 (see U.S. Pat. No. 5,641,876) and rice actin 2 genes, the maize alcohol dehydrogenase gene intron, the maize heat shock protein 70 gene intron (U.S. Pat. No. 5,593,874) and the maize shrunken 1 gene.

[0044] In other aspects of the invention, sufficient expression in plant seed tissues is desired to affect improvements in seed composition. Exemplary promoters for use for seed composition modification include promoters from seed genes such as napin (U.S. Pat. No. 5,420,034), maize L3 oleosin (U.S. Pat. No. 6,433,252), zein Z27 (Russell et al. (1997) Transgenic Res. 6(2):157-166), globulin 1 (Belanger et al (1991) Genetics 129:863-872), (glutelin 1 (Russell (1997) supra), and peroxiredoxin antioxidant (Per1) (Stacy et al. (1996) Plant Mol Biol. 31(6):1205-1216).

[0045] Recombinant DNA constructs prepared in accordance with the invention will also generally include a 3′ element that typically contains a polyadenylation signal and site. Well-known 3′ elements include those from Agrobacterium tumefaciens genes such as nos 3′, tml 3′, tmr 3′, tms 3′, ocs 3′, tr7 3′, for example disclosed in U.S. Pat. No. 6,090,627, incorporated herein by reference; 3′ elements from plant genes such as wheat (Triticum aesevitum) heat shock protein 17 (Hsp17 3′), a wheat ubiquitin gene, a wheat fructose-1,6-biphosphatase gene, a rice glutelin gene, a rice lactate dehydrogenase gene and a rice beta-tubulin gene, all of which are disclosed in U.S. published patent application 2002/0192813 A1, incorporated herein by reference; and the pea (Pisum sativum) ribulose biphosphate carboxylase gene (rbs 3′), and 3′ elements from the genes within the host plant.

[0046] Constructs and vectors may also include a transit peptide for targeting of a gene to a plant organelle, particularly to a chloroplast, leucoplast or other plastid organelle. For descriptions of the use of chloroplast transit peptides see U.S. Pat. No. 5,188,642 and U.S. Pat. No. 5,728,925, incorporated herein by reference. For description of the transit peptide region of an Arabidopsis EPSPS gene useful in the present invention, see Klee, H. J. et al (MGG (1987) 210:437-442).

[0047] Transgenic plants comprising or derived from plant cells of this invention transformed with recombinant DNA construct can be further enhanced with stacked traits, e.g. a crop plant haling an enhanced trait resulting from expression of DNA disclosed herein in combination with herbicide and/or pest resistance traits. For example, genes of the current invention can be stacked With other traits of agronomic interest, such as a trait providing herbicide resistance, or insect resistance, Such as using a gene from Bacillus thuringensis to provide resistance against lepidopteran, coliopteran, homopteran, hemiopteran, and other insects. Herbicides for which transgenic plant tolerance has been demonstrated and the method of the present invention can be applied include, but are not limited to, glyphosate, dicamba, glufosinate, sulfonylurea, bromoxynil and norflurazon herbicides. Polynucleotide molecules encoding proteins involved in herbicide tolerance are well-known in the art and include, but are not limited to, a polynucleotide molecule encoding 5-enolpyruvylshikimate-3-phosphate synthase (EPSPS) disclosed in U.S. Pat. Nos. 5,094,945; 5,627,061; 5,633,435 and 6,040,497 for imparting glyphosate tolerance; polynucleotide molecules encoding a glyphosate oxidoreductase (GOX) disclosed in U.S. Pat. No. 5,463,175 and a glyphosate-N-acetyl transferase (GAT) disclosed in U.S. Patent Application publication 2003/0083480 A1 also for imparting glyphosate tolerance; dicamba monooxygenase disclosed in U.S. Patent Application publication 2003/0135879 A1 for imparting dicamba tolerance; a polynucleotide molecule encoding bromoxynil nitrilase (Bxn) disclosed in U.S. Pat. No. 4,810,648 for imparting bromoxynil tolerance; a polynucleotide molecule encoding phytoene desaturase (crtI) described in Misawa et al, (1993) Plant J. 4:833-840 and in Misawa et al, (1994) Plant J. 6:481-489 for norflurazon tolerance; a polynucleotide molecule encoding acetohydroxyacid synthase (AHAS, aka ALS) described in Sathasiivan et al. (1990) Nucl. Acids Res. 18:2188-2193 for imparting tolerance to sulfonylurea herbicides; polynucleotide molecules known as bar genes disclosed in DeBlock, et al. (1987) EMBO J. 6:2513-2519 for imparting glufosinate and bialaphos tolerance; polynucleotide molecules disclosed in U.S. Patent Application Publication 2003/010609 A1 for imparting N-amino methyl phosphonic acid tolerance; polynucleotide molecules disclosed in U.S. Pat. No. 6,107,549 for imparting pyridine herbicide resistance; molecules and methods for imparting tolerance to multiple herbicides such as glyphosate, atrazine, ALS inhibitors, isoxaflutole and glufosinate herbicides are disclosed in U.S. Pat. No. 6,376,754 and U.S. Patent Application Publication 2002/0112260, all of said U.S. Patents and Patent Application Publications are incorporated herein by reference. Molecules and methods for imparting insect/nematode/virus resistance are disclosed in U.S. Pat. Nos. 5,250,515; 5,880,275; 6,506,599; 5,986,175 and U.S. Patent Application Publication 2003/0150017 A1, all of which are incorporated herein by reference.

### Plant Cell Transformation Methods

[0048] Numerous methods for transforming plant cells with recombinant DNA construct are known in the art and may be used in the present invention. Two commonly used methods for plant transformation are Agrobacterium-mediated transformation and microprojectile bombardment. Microprojectile bombardment methods are illustrated in U.S. Pat. Nos. 5,015,580 (soybean); 5,550,318 (corn); 5,538,880 (corn); 5,914,451 (soybean); 6,160,208 (corn); 6,399,861 (corn), 6,153,812 (wheat) and 6,365,807 (rice), and Agrobacterium-mediated transformation is described in U.S. Pat. Nos. 5,159,135 (cotton); 5,824,877 (soybean); 5,463,174 (canola); 5,591,616 (corn); 6,384,301 (soybean); 7,026,528 (wheat) and 6,329,571 (rice), all of which are incorporated herein by reference. For Agrobacterium tumefaciens based plant transformation system, additional elements present on transformation constructs will include T-DNA left and right border sequences to facilitate incorporation of the recombinant polynucleotide into the plant genome.

[0049] In general it is useful to introduce recombinant DNA randomly, i.e. at a nonspecific location, in the genome of a target plant line. In special cases it may be useful to target recombinant DNA insertion in order to achieve site-specific integration, for example, to replace an existing gene in the genome, to use an existing promoter in the plant genome, or to insert a recombinant polynucleotide at a predetermined site known to be active for gene expression. Several site specific recombination systems exist which are known to function implants include cre-lox as disclosed in U.S. Pat. No. 4,959,317 and FLP-FRT as disclosed in U.S. Pat. No. 5,527,695, both incorporated herein by reference.

[0050] Transformation methods of this invention are preferably practiced in tissue culture on media and in a controlled environment. “Media” refers to the numerous nutrient mixtures that are used to grow cells in vitro, that is, outside of the intact living organism. Recipient cell targets include, but are not limited to, meristem cells, callus, immature embryos and gametic cells such as microspores, pollen, sperm and egg cells. It is contemplated that any cell from which a fertile plant may be regenerated is useful as a recipient cell. Callus may be initiated from tissue sources including, but not limited to, immature embryos, seedling apical meristems, microspores and the like. Cells capable of proliferating as callus are also recipient cells for genetic transformation. Practical transformation methods and materials for making transgenic plants of this invention, for example various media and recipient target cells, transformation of immature embryo cells and subsequent regeneration of fertile transgenic plants are disclosed in U.S. Pat. Nos. 6,194,636 and 6,232,526, which are incorporated herein by reference.

[0051] The seeds of transgenic plants can be harvested from fertile transgenic plants and be used to grow progeny generations of transformed plants of this invention including hybrid plant lines for selection of plants having an enhanced trait. In addition to direct transformation of a plant with a recombinant DNA, transgenic plants can be prepared by crossing a first plant having a recombinant DNA with a second plant lacking the DNA. For example, recombinant DNA can be introduced into first plant line that is amenable to transformation to produce a transgenic plant which can be crossed with a second plant line to introgress the recombinant DNA into the second plant line. A transgenic plant with recombinant DNA providing an enhanced trait, e.g. enhanced yield, can be crossed with transgenic plant line having other recombinant DNA that confers another trait, for example herbicide resistance or pest resistance, to produce progeny plants having recombinant DNA that confers both traits. Typically, in such breeding, for combining traits the transgenic plant donating the additional trait is a male line and the transgenic plant carrying the base traits is the female line. The progeny of this cross will segregate such that some of the plants will carry the DNA for both parental traits and some will carry DNA for one parental trait; such plants can be identified by markers associated with parental recombinant DNA, e.g. marker identification by analysis for recombinant DNA or, in the case where a selectable marker is linked to the recombinant, by application of the selecting agent such as a herbicide for use with a herbicide tolerance marker, or by selection for the enhanced trait. Progeny plants carrying DNA for both parental traits can be crossed back into the female parent line multiple times, for example usually 6 to 8 generations, to produce a progeny plant with substantially the same genotype as one original transgenic parental line but for the recombinant DNA of the other transgenic parental line

[0052] In the practice of transformation DNA is typically introduced into only a small percentage of target plant cells in any one transformation experiment. Marker genes are used to provide an efficient system for identification of those cells that are stably transformed by receiving and integrating a transgenic DNA constrict into their genomes. Preferred marker genes provide selective markers which confer resistance to a selective agent, such as an antibiotic or herbicide. Any of the herbicides to which plants of this invention may be resistant are useful agents for selective markers. Potentially transformed cells are exposed to the selective agent. In the population of surviving cells will be those cells where, generally, the resistance-conferring gene is integrated and expressed at sufficient levels to permit cell survival. Cells may be tested further to confirm stable integration of the exogenous DNA. Commonly used selective marker genes include those conferring resistance to antibiotics such as kanamycin and paromomycin (nptII), hygromycin B (aph IV) and gentamycin (aac3 and aacC4) or resistance to herbicides such as glufosinate (bar or pat) and glyphosate (aroA or EPSPS). Examples of such selectable markers are illustrated in U.S. Pat. Nos. 5,550,318; 5,633,435; 5,780,708 and 6,118,047, all of which are incorporated herein by reference. Selectable markers which provide an ability to visually identify transformants can also be employed, for example, a gene expressing a colored or fluorescent protein such as a luciferase or green fluorescent protein (GFP) or a gene expressing a beta-glucuronidase or uidA gene (GUS) for which various chromogenic substrates are known.

[0053] Plant cells that survive exposure to the selective agent, or plant cells that have been scored positive in a screening assay, may be cultured in regeneration media and allowed to mature into plants. Developing plantlets regenerated from transformed plant cells can be transferred to plant growth mix, and hardened off, for example, in an environmentally controlled chamber at about 85% relative humidity, 600 ppm CO₂, and 25-250 microeinsteins m⁻² s⁻¹ of light, prior to transfer to a greenhouse or growth chamber for maturation. Plants are regenerated from about 6 weeks to 10 months after a transformant is identified, depending on the initial tissue. Plants may be pollinated using conventional plant breeding methods known to those of skill in the art and seed produced, for example self-pollination is commonly used with transgenic corn. The regenerated transformed plant or its progeny seed or plants can be tested for expression of the recombinant DNA and selected for the presence of enhanced agronomic trait.

### Transgenic Plants and Seeds

[0054] Transgenic plants derived from the plant cells of this invention are grown to generate transgenic plants having an enhanced trait as compared to a control plant and produce transgenic seed and pollen of this invention. Such plants with enhanced traits are identified by selection of transformed plants or progeny seed for the enhanced trait. For efficiency a selection method is designed to evaluate multiple transgenic plants (events) comprising the recombinant DNA, for example multiple plants from 2 to 20 or more transgenic events. Transgenic plants grown from transgenic seed provided herein demonstrate improved agronomic traits that contribute to increased yield or other trait that provides increased plant value, including, for example, improved seed quality. Of particular interest are plants having enhanced water use efficiency, enhanced cold tolerance, increased yield, enhanced nitrogen use efficiency, enhanced seed protein and enhanced seed oil.

[0055] Table 1 provides a list of protein encoding DNA (“genes”) that are useful as recombinant DNA for production of transgenic plants with enhanced agronomic trait, the elements of Table 1 are described by reference to:

“PEP SEQ ID NO” identifies an amino acid sequence from SEQ ID NO: 96 to 193.
“NUC SEQ ID NO” identifies a DNA sequence from SEQ ID NO: 1 to 95.
“BV id” is a reference to the identifying number in Table 4 of base vectors used for construction of the transformation vectors of the recombinant DNA. Construction of plant transformation constructs is illustrated in Example 1.
“Gene Name” is a common name for protein encoded by the recombinant DNA.
“Annotation” refers to a description of the top hit protein obtained from an amino acid sequence query of each PEP SEQ ID NO to GenBank database of the National Center for Biotechnology Information (ncbi). More particularly, gi is the GenBank ID number for the top BLAST hit;
“Descriptions” refers to the description of the top BLAST hit;
“% id” refers to the percentage of identically matched amino acid residues along the length of the portion of the sequences which is aligned by BLAST (-F T) between the sequence of interest provided herein and the hit sequence in GenBank.

TABLE 1

| | | |
|---|---|---|
| Nuc | Pep | |
| seq | seq | Annotation |

| ID | ID | | BV | | % | GenBank | |
|---|---|---|---|---|---|---|---|
| NO | NO | Gene ID | ID | GeneName | ID | ID | Desciption |
| 1 | 96 | PHE0004633_5508 | 4 | corn putative | 68 | 50947455 | ref\|XP_483255.1\|putative |
| | | | | transcription factor | | | transcription factor RAU1 |
| | | | | RAU1 | | | [Oryza sativa (japonica |
| | | | | | | | cultivar-group)] |
| 2 | 97 | PHE0004738_5674 | 1 | rice NAM protein | 82 | 55771315 | dbj\|BAD72224.1\|unknown |
| | | | | | | | protein [Oryza sativa |
| | | | | | | | (japonica cultivar-group)] |
| 3 | 98 | PHE0004814_5801 | 13 | corn KNOX family | 75 | 51535639 | dbj\|BAD37613.1\|KNOX |
| | | | | | | | family class 2 |
| | | | | | | | homeodomain protein |
| | | | | | | | [Oryza sativa (japonica |
| | | | | | | | cultivar-group)] |
| 4 | 99 | PHE0004817_5809 | 4 | corn PIF3-like | 69 | 50928761 | ref\|XP_473908.1\|OSJNBa0 |
| | | | | family | | | 058K23.6 [Oryza sativa |
| | | | | | | | (japonica cultivar-group)] |
| 5 | 100 | PHE0004817_5810 | 13 | corn PIF3-like | 69 | 50928761 | ref\|XP_473908.1\|OSJNBa0 |
| | | | | family gene | | | 058K23.6 [Oryza sativa |
| | | | | | | | (japonica cultivar-group)] |
| 6 | 101 | PHE0004821_5819 | 12 | corn PIF3-like | 61 | 55296133 | dbj\|BAD67851.1\|basic |
| | | | | family gene | | | helix-loop-helix protein |
| | | | | | | | SPATULA-like [Oryza |
| | | | | | | | sativa (japonica cultivar- |
| | | | | | | | group)] |
| 7 | 102 | PHE0004828_5826 | 4 | soy PIF3-like | 53 | 92897142 | gb\|ABE93546.1\|Helix-loop- |
| | | | | family gene | | | helix DNA-binding |
| | | | | | | | [Medicago truncatula] |
| 8 | 103 | PHE0004817_5901 | 12 | corn PIF3-like | 69 | 50928761 | ref\|XP_473908.1\|OSJNBa0 |
| | | | | family gene | | | 058K23.6 [Oryza sativa |
| | | | | | | | (japonica cultivar-group)] |
| 9 | 104 | PHE0004861_5910 | 4 | rice putative | 87 | 34899818 | ref\|NP_911255.1\|putative |
| | | | | SCARECROW | | | SCARECROW protein |
| | | | | protein | | | [Oryza sativa (japonica |
| | | | | | | | cultivar-group)] |
| 10 | 105 | PHE0004863_5912 | 4 | corn putative AT- | 61 | 50916020 | ref\|XP_468474.1\|putative |
| | | | | hook protein | | | AT-hook protein 1 [Oryza |
| | | | | | | | sativa (japonica cultivar- |
| | | | | | | | group)] |
| 11 | 106 | PHE0002062_5913 | 4 | corn R2R3 Myb | 59 | 50946113 | ref\|XP_482584.1\|putative |
| | | | | protein | | | typical P-type R2R3 Myb |
| | | | | | | | protein [Oryza sativa |
| | | | | | | | (japonica cultivar-group)] |
| 12 | 107 | PHE0002531_5926 | 17 | corn DNA-binding | 78 | 95102176 | gb\|ABF51012.1\|DOF1 [Zea |
| | | | | protein MNB1a | | | mays] |
| 13 | 108 | PHE0004914_5971 | 4 | soy syringolide- | 93 | 19911577 | dbj\|BAB86892.1\|syringolide- |
| | | | | induced protein | | | induced protein 1-3-1A |
| | | | | | | | [Glycine max] |
| 14 | 109 | PHE0004924_5982 | 4 | soy TCP family | 74 | 18396089 | ref\|NP_566164.1\|PTF1 |
| | | | | transcription factor | | | Plastid Transcription Factor |
| | | | | | | | 1 [Arabidopsis thaliana] |
| | | | | | | | gb\|AAM62743.1\| unknown |
| | | | | | | | [symbol] |
| 15 | 110 | PHE0004925_5983 | 4 | Arabidopsis | 94 | 15230904 | ref\|NP_191351.1\|DNA |
| | | | | squamosa | | | binding/transcription factor |
| | | | | promoter-binding | | | [Arabidopsis thaliana] |
| | | | | protein | | | sp\|Q9M2Q6\|SPL15_ARAT |
| | | | | | | | H Squamosa promoter- |
| | | | | | | | binding-like protein 15 |
| 16 | 111 | PHE0004938_5994 | 4 | Arabidopsis | 96 | 15228553 | ref\|NP_186995.1\|RGL2 |
| | | | | gibberellin- | | | (RCA-LIKE 2); |
| | | | | responsive | | | transcription factor |
| | | | | modulator | | | [Arabidopsis thaliana] |
| | | | | | | | sp\|Q8GXW1\|RGL2_ARAT |
| | | | | | | | H DELLA protein RGL2 |
| | | | | | | | (RCA-like protein 2) |
| | | | | | | | (Scarecrow-like protein 19) |
| 17 | 112 | PHE0004957_6019 | 4 | corn C2H2-type | 68 | 50933653 | ref\|XP_476354.1\|C2H2-type |
| | | | | zinc finger protein | | | zinc finger protein-like |
| | | | | | | | protein [Oryza sativa |
| | | | | | | | (japonica cultivar-group)] |
| 18 | 113 | PHE0004958_6020 | 4 | corn putative | 50 | 50940107 | ref\|XP_479581.1\|putative |
| | | | | ascorbate oxidase | | | ascorbate oxidase promoter- |
| | | | | promoter-binding | | | binding protein AOBP |
| | | | | protein | | | [Oryza sativa (japonica |
| | | | | | | | cultivar-group)] |
| | | | | | | | ref\|XP_506580.1\| |
| | | | | | | | PREDICTED |
| | | | | | | | OSJNBa0060O17.31 gene |
| | | | | | | | product [Oryza sativa |
| | | | | | | | (japonica cultivar-group)] |
| 19 | 114 | PHE0004959_6021 | 4 | corn putative | 41 | 56567581 | gb\|AAV98700.1\|BTH- |
| | | | | EREBP-type | | | induced ERF transcriptional |
| | | | | transcription factor | | | factor 1 [Oryza sativa |
| | | | | | | | (indica cultivar-group)] |
| 20 | 115 | PHE0004974_6040 | 4 | corn auxin | 74 | 108864436 | gb\|ABG22499.1\|Auxin |
| | | | | response factor | | | response factot 2, [Oryza |
| | | | | | | | sativa (japonica cultivar- |
| | | | | | | | group)] |
| 21 | 116 | PHE0004975_6041 | 4 | corn auxin | 67 | 77555450 | gb\|ABA98246.1\|Auxin |
| | | | | response factor | | | response factor 2, [Oryza |
| | | | | | | | sativa (japonica cultivar- |
| | | | | | | | group)] |
| 22 | 117 | PHE0004987_6056 | 4 | soy transfactor-like | 63 | 77403669 | dbj\|BAE46413.1\|MYB-CC |
| | | | | protein | | | type transfactor [Solanum |
| | | | | | | | tuberosum] |
| 23 | 118 | PHE0005005_7034 | 4 | corn putative Myb- | 52 | 37536868 | ref\|NP_922736.1\|putative |
| | | | | related protein | | | Myb-related protein [Oryza |
| | | | | | | | sativa (japonica cultivar- |
| | | | | | | | group)] |
| 24 | 119 | PHE0004877_7030 | 12 | corn response | 76 | 56784051 | dbj\|BAD82798.1\| putative |
| | | | | regulator ARR11 | | | response regulator 11 |
| | | | | | | | [Oryza sativa (japonica |
| | | | | | | | cultivar-group)] |
| 25 | 120 | PHE0006057_7048 | 13 | wheat PIF3-like | 40 | 109134123 | dbj\|BAC41905.1\| putative |
| | | | | family gene | | | bHLH transcription factor |
| | | | | | | | bHLH016 [Arabidopsis |
| | | | | | | | thaliana] |
| 26 | 121 | PHE0006057_7053 | 12 | wheat PIF3-like | 40 | 109134123 | dbj\|BAC41905.1\| putative |
| | | | | family gene | | | bHLH transcription factor |
| | | | | | | | bHLH016 [Arabidopsis |
| | | | | | | | thaliana] |
| 27 | 122 | PHE0006070_7067 | 4 | corn putative | 64 | 54291039 | dbj\|BAD61716.1\|transcrip- |
| | | | | transcription factor | | | tion factor-like [Oryza sativa |
| | | | | | | | (japonica cultivar-group)] |
| 28 | 123 | PHE0006073_7072 | 4 | corn putative bZIP | 64 | 54291039 | dbj\|BAD61716.1\|transcrip- |
| | | | | transcription factor | | | tion factor-like [Oryza sativa |
| | | | | | | | (japonica cultivar-group)] |
| 29 | 124 | PHE0006004_7082 | 4 | soy NAM like | 51 | 15224202 | gb\|AAD22369.1\| NAM (no |
| | | | | protein | | | apical meristem)-like |
| | | | | | | | protein [Arabidopsis |
| | | | | | | | thaliana] |
| | | | | | | | sp\|Q9SK55\|NAC42_ARAT |
| | | | | | | | H Putative NAC domain- |
| | | | | | | | containing protein 42 |
| | | | | | | | (ANAC042) |
| 30 | 125 | PHE0006022_7105 | 4 | soy transcription | 82 | 18643341 | gb\|AAL76272.1\|transcrip- |
| | | | | factor EIL1 | | | tion factor EIL1 [Vigna |
| | | | | | | | radiata] |
| 31 | 126 | PHE0006023_7240 | 4 | Arabidopsis bHLH | 92 | 15241896 | ref\|NP_201067.1\|DNA |
| | | | | family protein | | | binding/transcription factor |
| | | | | | | | [Arabidopsis thaliana] |
| 32 | 127 | PHE0006191_7251 | 8 | EEM7 | 60 | 50936701 | ref\|XP_477878.1\|hypotheti- |
| | | | | | | | cal protein [Oryza sativa |
| | | | | | | | (japonica cultivar-group)] |
| 33 | 128 | PHE0006237_7261 | 18 | Lycopersicon | 86 | 18650662 | gb\|AAL75809.1\|ethylene |
| | | | | SHN1 | | | response factor 1 |
| | | | | | | | [Lycopersicon esculentum] |
| 34 | 129 | PHE0006237_7274 | 17 | Lycopersicon | 86 | 18650662 | gb\|AAL75809.1\|ethylene |
| | | | | SHN1 | | | response factor 1 |
| | | | | | | | [Lycopersicon esculentum] |
| 35 | 130 | PHE0006237_7268 | 6 | Lycopersicon | 86 | 18650662 | gb\|AAL75809.1\|ethylene |
| | | | | SHN1 | | | response factor 1 |
| | | | | | | | [Lycopersicon esculentum] |
| 36 | 131 | PHE0006237_7277 | 5 | Lycopersicon | 86 | 18650662 | gb\|AAL75809.1\|ethylene |
| | | | | SHN1 | | | response factor 1 |
| | | | | | | | [Lycopersicon esculentum] |
| 37 | 132 | PHE0006237_7284 | 11 | Lycopersicon | 86 | 18650662 | gb\|AAL75809.1\|ethylene |
| | | | | SHN1 | | | response factor 1 |
| | | | | | | | [Lycopersicon esculentum] |
| 38 | 133 | PHE0004816_7303 | 4 | corn PIF3-like | 82 | 50928761 | ref\|XP_473908.1\|OSJNBa0 |
| | | | | family gene | | | 058K23.6 [Oryza sativa |
| | | | | | | | (japonica cultivar-group)] |
| 39 | 134 | PHE0006291_7319 | 17 | soy putative | 42 | 15227152 | ref\|NP_182310.1\|transcrip- |
| | | | | CONSTANS-like | | | tion factor/zinc ion binding |
| | | | | B-box zinc finger | | | [Arabidopsis thaliana] |
| | | | | protein | | | |
| 40 | 135 | PHE0004816_7421 | 12 | corn PIF3-like | 82 | 50928761 | ref\|XP_473908.1\|OSJNBa0 |
| | | | | family gene | | | 058K23.6 [Oryza sativa |
| | | | | | | | (japonica cultivar-group)] |
| 41 | 136 | PHE0004816_7418 | 4 | corn PIF3-like | 82 | 50928761 | ref\|XP_473908.1\|OSJNBa0 |
| | | | | family gene | | | 058K23.6 [Oryza sativa |
| | | | | | | | (japonica cultivar-group)] |
| 42 | 137 | PHE0003673_7430 | 4 | corn response | 76 | 56784051 | dbj\|BAD82798.1\|putative |
| | | | | regulator like | | | response regulator 11 |
| | | | | | | | [Oryza sativa (japonica |
| | | | | | | | cultivar-group)] |
| 43 | 138 | PHE0003664_7436 | 4 | soy AP2/EREBP | 48 | 15227980 | gb\|AAT44934.1\| putative |
| | | | | transcription factor | | | AP2/EREBP transcription |
| | | | | like | | | factor [Arabidopsis thaliana] |
| 44 | 139 | PHE0004816_7445 | 13 | corn PIF3-Iike | 82 | 50928761 | ref\|XP_473908.1\|OSJNBa0 |
| | | | | family gene | | | 058K23.6 [Oryza sativa |
| | | | | | | | (japonica cultivar-group)] |
| 45 | 140 | PHE0002149_7487 | 4 | corn DNA-binding | 66 | 50941323 | ref\|XP_480189.1\|putative |
| | | | | protein | | | LHY protein [Oryza sativa |
| | | | | | | | (japonica cultivar-group)] |
| 46 | 141 | PHE0006290_7498 | 4 | corn putative | 70 | 50912285 | ref\|XP_467550.1\|zinc-finger |
| | | | | CONSTANS-like | | | protein [Oryza sativa |
| | | | | B-box zinc finger | | | (japonica cultivar-group)] |
| | | | | protein | | | |
| 47 | 142 | PHE0006423_7664 | 4 | soy Myb61 | 56 | 92873337 | gb\|ABE81808.1\|Homeodo- |
| | | | | | | | main-related [Medicago |
| | | | | | | | truncatula] |
| 48 | 143 | PHE0006384_7737 | 9 | rice R2R3 Myb | 55 | 50946113 | ref\|XP_482584.1\|putative |
| | | | | protein | | | typical P-type R2R3 Myb |
| | | | | | | | protein [Oryza sativa |
| | | | | | | | (japonica cultivar-group)] |
| 49 | 144 | PHE0006384_7789 | 13 | rice R2R3 Myb | 55 | 50946113 | ref\|XP_482584.1\|putative |
| | | | | protein | | | typical P-type R2R3 Myb |
| | | | | | | | protein [Oryza sativa |
| | | | | | | | (japonica cultivar-group)] |
| 50 | 145 | PHE0006507_7828 | 17 | Corn NFB1_23C | 98 | 50916531 | gb\|ABF96585.1\| CCAAT- |
| | | | | | | | binding transcription factor |
| | | | | | | | subunit A [Oryza sativa |
| | | | | | | | (japonica cultivar-group)] |
| 51 | 146 | PHE0006509_7846 | 19 | Arabidopsis | 60 | 62856979 | gb\|AAY16440.1\|squamosa |
| | | | | Gm2010 | | | promoter binding-like |
| | | | | | | | protein [Betula platyphylla] |
| 52 | 147 | PHE0006384_7839 | 19 | rice R2R3 Myb | 55 | 50946113 | ref\|XP_482584.1\|putative |
| | | | | protein | | | typical P-type R2R3 Myb |
| | | | | | | | protein [Oryza sativa |
| | | | | | | | (japonica cultivar-group)] |
| 53 | 148 | PHE0006448_7859 | 17 | Arabidopsis | 99 | 15217662 | ref\|NP_176634.1\|transcrip- |
| | | | | transcription factor | | | tion factor [Arabidopsis |
| | | | | | | | thaliana] gb\|AAN41333.1\| |
| | | | | | | | unknown protein |
| | | | | | | | [Arabidopsis thaliana] |
| 54 | 149 | PHE0006504_7876 | 17 | maize tubby 4 | 69 | 55733806 | gb\|AAV59313.1\|putative |
| | | | | | | | tubby protein [Oryza sativa |
| | | | | | | | (japonica cultivar-group)] |
| 55 | 150 | PHE0006057_7929 | 15 | wheat PIF3-like | 40 | 109134123 | dbj\|BAC41905.1\| putative |
| | | | | family gene | | | bHLH transcription factor |
| | | | | | | | bHLH016 [Arabidopsis |
| | | | | | | | thaliana] |
| 56 | 151 | PHE0003473_7927 | 9 | soy Zinc finger | 50 | 87162706 | gb\|ABD28501.1\|Zinc finger, |
| | | | | protein like | | | C2H2-type [Medicago |
| | | | | | | | truncatula] |
| 57 | 152 | PHE0002531_7985 | 45 | corn DNA-binding | 78 | 95102176 | gb\|ABF51012.1\|DOF1 [Zea |
| | | | | protein MNB1a | | | mays] |
| 58 | 153 | PHE0004463_8059 | 15 | soy ethylene | 48 | 15238727 | ref\|NP_197901.1\|DNA |
| | | | | response factor | | | binding/transcription factor |
| | | | | | | | [Arabidopsis thaliana] |
| 59 | 154 | PHE0001067_8154 | 10 | Arabidopsis | 89 | 15237035 | ref\|NP_195280.1\|DNA |
| | | | | homeodomain | | | binding/transcription factor |
| | | | | transcription factor | | | [Arabidopsis thaliana] |
| | | | | | | | sp\|O81788\|WOX13_ARAT |
| | | | | | | | H WUSCHEL-related |
| | | | | | | | homeobox 13 |
| 60 | 155 | PHE0006350_8201 | 15 | GIA/RGA-like | 46 | 63054405 | gb\|AAY28970.1\|GIA/RGA- |
| | | | | gibberellin | | | like gibberellin response |
| | | | | response modulator | | | modulator [Gossypium |
| | | | | | | | hirsutum] |
| 61 | 156 | PHE0006605_8233 | 17 | Arabidopsis Zinc | 74 | 15230393 | ref\|NP_190677.1\|transcrip- |
| | | | | finger (GATA | | | tion factor [Arabidopsis |
| | | | | type) family | | | thialiana] |
| | | | | protein | | | |
| 62 | 157 | PHE0006546_8310 | 8 | Response regulator | 61 | 55771374 | dbj\|BAD72541.1\|putative |
| | | | | 9 | | | response regulator 9 [Oryza |
| | | | | | | | sativa (japonica cultivar- |
| | | | | | | | group)] |
| 63 | 158 | PHE0006527_8369 | 17 | NFB1-Q185H | 97 | 50916531 | gb\|ABF96585.1\| CCAAT- |
| | | | | | | | binding transcription factor |
| | | | | | | | subunit A [Oryza sativa |
| | | | | | | | (japonica cultivar-group)] |
| 64 | 159 | PHE0004938_8370 | 17 | Arabidopsis | 96 | 15228553 | sp\|Q8GXW1\|RGL2_ARAT |
| | | | | gibberellin- | | | H DELLA protein RGL2 |
| | | | | responsive | | | (RGA-like protein 2) |
| | | | | modulator | | | (Scarecrow-like protein 19) |
| | | | | | | | [Arabidopsis thaliana] |
| 65 | 160 | PHE0006774_8489 | 15 | NFB2_E76R_S83 | 82 | 115840 | sp\|P25209\|NFYB_Maize |
| | | | | R | | | Nuclear transcription factor Y |
| | | | | | | | subunit B (NF-YB) (CAAT- |
| | | | | | | | box DNA-binding protein |
| | | | | | | | subunit B) |
| 66 | 161 | PHE0006778_8503 | 15 | NFB2_149R_C73S | 82 | 115840 | sp\|P25209\|NFYB_Maize |
| | | | | _C89S | | | Nuclear transcription factor Y |
| | | | | | | | subunit B (NF-YB) (CAAT- |
| | | | | | | | box DNA-binding protein |
| | | | | | | | subunit B) |
| 67 | 162 | PHE0006780_8502 | 15 | NFB2_C73S_C89S | 82 | 115840 | sp\|P25209\|NFYB_Maize |
| | | | | _L102R | | | Nuclear transcription factor |
| | | | | | | | Y subunit B (NF-YB) |
| | | | | | | | (CAAT-box DNA-binding |
| | | | | | | | protein subunit B) |
| 68 | 163 | PHE0006752_8521 | 16 | wheat AP1 | 75 | 30721847 | gb\|AAP33790.1\|MADS-box |
| | | | | (VRN1) | | | protein TaVRT-1 |
| | | | | | | | gb\|AAW7322S.1\| VRN-B1 |
| | | | | | | | [Triticum aestivum] |
| 69 | 164 | PHE0006779_8565 | 15 | corn | 82 | 115840 | sp\|P25209\|NFYB_Maize |
| | | | | NFB2_C73R_C89 | | | Nuclear transcription factor Y |
| | | | | S | | | subunit B (NF-YB) (CAAT- |
| | | | | | | | box DNA-binding protein |
| | | | | | | | subunit B) |
| 70 | 165 | PHE0006781_8573 | 15 | corn | 82 | 115840 | sp\|P25209\|NFYB_Maize |
| | | | | NFB2_149R_C73R | | | Nuclear transcription factor Y |
| | | | | _C89S_L102R | | | subunit B (NF-YB) (CAAT- |
| | | | | | | | box DNA-binding protein |
| | | | | | | | subunit B) |
| 71 | 166 | PHE0003664_8637 | 15 | soy AP2/EREBP | 48 | 15227980 | gb\|AAT44934.1\| putative |
| | | | | transcription factor | | | AP2/EREBP transcription |
| | | | | | | | factor [Arabidopsis thaliana] |
| 72 | 167 | PHE0006004_8667 | 15 | soy NAM like | 51 | 15224202 | ref\|NP_181828.1\|ANAC042; |
| | | | | protein | | | transcription factor |
| | | | | | | | gb\|AAD22369.1\| NAM (no |
| | | | | | | | apical meristem)-like |
| | | | | | | | protein [Arabidopsis |
| | | | | | | | thaliana] |
| 73 | 168 | PHE0006022_8690 | 15 | soy transcription | 82 | 18643341 | gb\|AAL76272.1\|transcrip- |
| | | | | factor EIL1 | | | tion factor EIL1 [Vigna |
| | | | | | | | radiata] |
| 74 | 169 | PHE0006290_8689 | 15 | corn putative | 70 | 50912285 | ref\|XP_467550.1\|zinc-finger |
| | | | | CONSTANS-like | | | protein [Oryza sativa |
| | | | | B-box zinc finger | | | (japonica cultivar-group)] |
| | | | | protein | | | |
| 75 | 170 | PHE0006423_8696 | 15 | soy Myb61 | 56 | 92873337 | gb\|ABE81808.1\|Homeo- |
| | | | | | | | domain-related [Medicago |
| | | | | | | | truncatula] |
| 76 | 171 | PHE0002149_8748 | 15 | corn DNA-binding | 66 | 50941323 | ref\|XP_480189.1\|putative |
| | | | | protein | | | LHY protein [Oryza sativa |
| | | | | | | | (japonica cultivar-group)] |
| 77 | 172 | PHE0006023_8762 | 15 | Arabidopsis bHLH | 92 | 15241896 | ref\|NP_201067.1\|DNA |
| | | | | family protein | | | binding/transcription factor |
| | | | | | | | [Arabidopsis thaliana] |
| 78 | 173 | PHE0004987_8771 | 15 | soy transfactor-like | 63 | 77403669 | dbj\|BAE46413.1\|MYB-CC |
| | | | | protein | | | type transfactor [Solanum |
| | | | | | | | tuberosum] |
| 79 | 174 | PHE0006858_8859 | 7 | corn MADS box | 97 | 939781 | gb\|AAB00079.1\|MADS box |
| | | | | protein | | | protein |
| 80 | 175 | PHE0006860_8863 | 7 | corn kernel specific | 100 | 939779 | gb\|AAB00078.1\|MADS box |
| | | | | MADS | | | protein |
| 81 | 176 | PHE0006955_9129 | 20 | Lycopersicon | 67 | 24967140 | gb\|AAM33103.2\|TAGL12 |
| | | | | esculentum | | | transcription factor |
| | | | | TAGL12 | | | [Lycopersicon esculentum] |
| | | | | transcription factor | | | |
| 82 | 177 | PHE0006951_9137 | 20 | AT5g52010/MSG1 | 97 | 15242250 | ref\|NP_200014.1\|nucleic |
| | | | | 5_9 | | | acid binding/transcription |
| | | | | | | | factor/zinc ion binding |
| | | | | | | | [Arabidopsis thaliana] |
| 83 | 178 | PHE0006981_9158 | 15 | GRAS family | 59 | 92886232 | gb\|ABE88228.1\|GRAS |
| | | | | transcription factor | | | family transcription factor |
| | | | | | | | [Medicago truncatula] |
| 84 | 179 | PHE0006951_9173 | 15 | AT5g52010\|MSG1 | 97 | 15242250 | ref\|NP_200014.1\|nucleic |
| | | | | 5_9 | | | acid binding/transcription |
| | | | | | | | factor/zinc ion binding |
| | | | | | | | [Arabidopsis thaliana] |
| 85 | 180 | PHE0004646_PM | 17 | Arabidopsis NAM | 86 | 9758529 | dbj\|BAB08905.1\|unnamed |
| | | ON94356.pep | | family protein | | | protein product |
| | | | | | | | [Arabidopsis thaliana] |
| 86 | 181 | PHE0004723_PM | 17 | soy auxin-induced | 92 | 114733 | sp\|P13088\|AUX22_SOYBN |
| | | ON94660.pep | | protein | | | Auxin-induced protein |
| | | | | | | | AUX22 |
| 87 | 182 | PHE0004648_PM | 4 | Arabidopsis | 93 | 20152540 | emb\|CAD29662.1\|putative |
| | | ON95051.pep | | putative auxin | | | auxin response factor 23 |
| | | | | response factor 23 | | | [Arabidopsis thaliana] |
| 88 | 183 | PHE0004357_PM | 2 | corn | 47 | 50927517 | ref\|XP_473403.1\|OSJNBa0 |
| | | ON94163.pep | | OSJNBa0079A21. | | | 079A21.14 [Oryza sativa |
| | | | | 14 | | | (japonica cultivar-group)] |
| 89 | 184 | PHE0004646_PM | 2 | Arabidopsis NAM | 86 | 9758529 | dbj\|BAB08905.1\|unnamed |
| | | ON94352.pep | | family protein | | | protein product |
| | | | | | | | [Arabidopsis thaliana] |
| 90 | 185 | PHE0004624_PM | 2 | soy auxin response | 65 | 30027167 | gb\|AAP06759.1\|auxin |
| | | ON94400.pep | | factor-like protein | | | response factor-like protein |
| | | | | | | | [Mangifera indica] |
| 91 | 186 | PHE0004463_PM | 2 | soy ethylene | 48 | 15238727 | ref\|NP_197901.1\|DNA |
| | | ON94432.pep | | response factor | | | binding/transcription factor |
| | | | | | | | [Arabidopsis thaliana] |
| 92 | 187 | PHE0004356_PM | 1 | corn LEC2/FUS3 | 66 | 56785317 | dbj\|BAD82277.1\|regulatory |
| | | ON93862.pep | | | | | protein Viviparous-1-like |
| | | | | | | | [Oryza sativa (japonica |
| | | | | | | | cultivar-group)] |
| 93 | 188 | PHE0004332_PM | 14 | tomato Pti4 | 85 | 3342211 | gb\|AAC50047.1\|Pti4 |
| | | ON95104.pep | | | | | [Lycopersicon esculentum] |
| 94 | 189 | PHE0004644_PM | 3 | corn ICE1-like | 50 | 77551194 | gb\|ABA93991.1\|Helix-loop- |
| | | ON95096.pep | | | | | helix DNA-binding domain |
| | | | | | | | containing protein [Oryza |
| | | | | | | | sativa (japonica cultivar- |
| | | | | | | | group)] |
| 95 | 190 | PHE0004723_PM | 4 | soy auxin-induced | 92 | 114733 | sp\|P13088\|AUX22_SOYBN |
| | | ON95121.pep | | protein | | | Auxin-induced protein |
| | | | | | | | AUX22 |

Selection Methods for Transgenic Plants with Enhanced Agronomic Trait

[0056] Within a population of transgenic plants regenerated from plant cells transformed with the recombinant DNA construct many plants that survive to fertile transgenic plants that produce seeds and progeny plants will not exhibit an enhanced agronomic trait. Selection from the population is necessary to identify one or more transgenic plant cells that can provide plants with the enhanced trait. Transgenic plants having enhanced agronomic traits are selected from populations of plants regenerated or derived from plant cells transformed as described herein by evaluating the plants in a variety of assays to detect an enhanced trait, e.g. enhanced water use efficiency, enhanced cold tolerance, increased yield, enhanced nitrogen use efficiency, enhanced seed protein and enhanced seed oil. These assays also may take many forms including, but not limited to, direct screening for the trait in a greenhouse or field trial or by screening for a surrogate trait. Such analyses can be directed to detecting changes in the chemical composition, biomass, physiological properties, morphology of the plant. Changes in chemical compositions such as nutritional composition of grain can be detected by analysis of the seed composition and content of protein, free amino acids, oil, free fatty acids, starch or tocopherols. Changes in biomass characteristics can be made on greenhouse or field grown plants and can include plant height, stem diameter, root and shoot dry weights; and, for corn plants, ear length and diameter. Changes in physiological properties can be identified by evaluating responses to stress conditions, for example assays using imposed stress conditions such as water deficit, nitrogen deficiency, cold growing conditions, pathogen or insect attack or light deficiency, or increased plant density. Changes in morphology can be measured by visual observation of tendency of a transformed plant with an enhanced agronomic trait to also appear to be a normal plant as compared to changes toward busily, taller, thicken narrower leaves, striped leaves, knotted trait, chlorosis, albino, anthocyanin production, or altered tassels, ears or roots. Other selection properties include days to pollen shed, days to silking, leaf extension rate, chlorophyll content, leaf temperature, stand, seedling vigor, internode length, plant height, leaf number, leaf area, tillering, brace roots, stay green, stalk lodging, root lodging, plant health, barreness/prolificacy, green snap, and pest resistance. In addition, phenotypic characteristics of harvested grain may be evaluated, including number of kernels per row on the ear, number of rows of kernels on the ear, kernel abortion, kernel weight, kernel size, kernel density and physical grain quality. Although the plant cells and methods of this invention can be applied to any plant cell, plant, seed or pollen, e.g. any fruit, vegetable, grass, tree or ornamental plant, the various aspects of the invention are preferably applied to corn, soybean, cotton, canola, alfalfa, wheat and rice plants. In many cases the invention is applied to corn plants that are inherently resistant to disease from the Mal de Rio Cuarto Virus or the Puccina sorghi fungus or both.

[0057] The following examples are included to demonstrate aspects of the invention, those of skill in the art should, in light of the present disclosure, appreciate that many changes can be made in the specific aspects which are disclosed and still obtain a like or similar results without departing from the spirit and scope of the invention.

### EXAMPLE 1

### Plant Expression Constructs

[0058] This example illustrates the construction of plasmids for transferring recombinant DNA into plant cells which can be regenerated into transgenic plants of this invention.

### A. Plant Expression Constructs for Corn Transformation

[0059] A base corn plant transformation vector pMON93039, as set forth in SEQ ID NO: 2202, illustrated in Table 2 and FIG. 2, was fabricated for use in preparing recombinant DNA for Agrobacterium-mediated transformation into corn tissue.

TABLE 2

| | | | Coordinates of |
|---|---|---|---|
| | | | SEQ ID NO: |
| Function | Name | Annotation | 2202 |
| Agro T-DNA | B-AGRtu.right border | Agro right border sequence, | 11364-11720 |
| transfer | | essential for transfer of T- | |
| | | DNA. | |
| Gene of | E-Os.Act1 | Upstream promoter region | 19-775 |
| interest | | of the rice actin 1 gene | |
| expression | E-CaMV.35S.2xA1-B3 | Duplicated 35S A1-B3 | 788-1120 |
| cassette | | domain without TATA box | |
| | P-Os.Act1 | Promoter region of the rice | 1125-1204 |
| | | actin 1 gene | |
| | L-Ta.Lhcb1 | 5′ untranslated leader of | 1210-1270 |
| | | wheat major chlorophyll | |
| | | a/b binding protein | |
| | I-Os.Act1 | First intron and flanking | 1287-1766 |
| | | UTR exon sequences from | |
| | | the rice actin 1 gene | |
| | T-St.Pis4 | 3′ non-translated region of | 1838-2780 |
| | | the potato proteinase | |
| | | inhibitor II gene which | |
| | | functions to direct | |
| | | polyadenylation of the | |
| | | mRNA | |
| Plant | P-Os.Act1 | Promoter from the rice | 2830-3670 |
| selectable | | actin 1 gene | |
| marker | L-Os.Act1 | First exon of the rice actin 1 | 3671-3750 |
| expression | | gene | |
| cassette | I-Os.Act1 | First intron and flanking | 3751-4228 |
| | | UTR exon sequences from | |
| | | the rice actin 1 gene | |
| | TS-At.ShkG-CTP2 | Transit peptide region of | 4238-4465 |
| | | Arabidopsis EPSPS | |
| | CR-AGRtu.aroA-CP4.nat | Coding region for bacterial | 4466-5833 |
| | | strain CP4 native aroA | |
| | | gene | |
| | T-AGRtu.nos | A 3′ non-translated region | 5849-6101 |
| | | of the nopaline synthase | |
| | | gene of Agrobacterium | |
| | | tumefaciens Ti plasmid | |
| | | which functions to direct | |
| | | polyadenylation of the | |
| | | mRNA. | |
| Agro T-DNA | B-AGRtu.left border | Agro left border sequence, | 6168-6609 |
| transfer | | essential for transfer of T- | |
| | | DNA. | |
| Maintenance | OR-Ec.oriV-RK2 | The vegetative origin of | 6696-7092 |
| in E. coli | | replication from plasmid | |
| | | RK2. | |
| | CR-Ec.rop | Coding region for repressor | 8601-8792 |
| | | of primer from the ColE1 | |
| | | plasmid. Expression of this | |
| | | gene product interferes with | |
| | | primer binding at the origin | |
| | | of replication, keeping | |
| | | plasmid copy number low. | |
| | OR-Ec.ori-ColE1 | The minimal origin of | 9220-9808 |
| | | replication from the E. coli | |
| | | plasmid ColE1. | |
| | P-Ec.aadA-SPC/STR | Promoter for Tn7 | 10339-10380 |
| | | adenylyltransferase (AAD | |
| | | (3″)) | |
| | CR-Ec.aadA-SPC/STR | Coding region for Tn7 | 10381-11169 |
| | | adenylyltransferase (AAD | |
| | | (3″)) conferring | |
| | | spectinomycin and | |
| | | streptomycin resistance. | |
| | T-Ec.aadA-SPC/STR | 3′ UTR from the Tn7 | 11170-11227 |
| | | adenylyltransferase (AAD | |
| | | (3″)) gene of E. coli. | |

[0060] Another embodiment of corn plant transformation base vector is pMON92705, as set forth in SEQ ID NO: 2203, illustrated in Table 3 and FIG. 3, which was fabricated for use in preparing recombinant DNA for Agrobacterium-mediated transformation into corn tissue.

[0061] Other base ejectors similar to those described above were also constructed as listed in Table 4. See Table 4 for a summary of base ejector plasmids and base vector ID's which are referenced in Table 1. Also see Table 5 for a summary of regulatory elements used in the gene expression cassette for these base vectors and SEQ ID NOs for elements.

TABLE 3

| | | | Coordinates |
|---|---|---|---|
| | | | of SEQ ID |
| Function | Name | Annotation | NO: 2203 |
| Agro T-DNA | B-AGRtu. right border | Agro right border sequence, | 5206-5562 |
| transfer | | essential for transfer of T- | |
| | | DNA. | |
| Gene of | P-Os.Act1 | Promoter from rice actin 1 | 5580-6423 |
| interest | | gene | |
| expression | L-Os.Act1 | 5′ UTR of rice Act7 (or 1) | 6424-6503 |
| cassette | | gene | |
| | I-Os.Act1 | Intron from the rice actin7 | 6504-6980 |
| | | gene | |
| | T-St.Pis4 | 3′ non-translated region of the | 7055-7997 |
| | | potato proteinase inhibitor II | |
| | | gene which functions to direct | |
| | | polyadenylation of the mRNA | |
| Plant | P-Os.Act1 | Promoter from the rice actin 1 | 8047-8887 |
| selectable | | gene | |
| marker | L-Os.Act1 | First exon of the rice actin 1 | 8888-8967 |
| expression | | gene | |
| cassette | I-Os.Act1 | First intron and flanking UTR | 8968-9445 |
| | | exon sequences from the rice | |
| | | actin 1 gene | |
| | TS-At.ShkG-CTP2 | Transit peptide region of | 9455-9682 |
| | | Arabidopsis EPSPS | |
| | CR-AGRtu.aroA-CP4.nat | Coding region for bacterial | 9683-11050 |
| | | strain CP4 native aroA gene | |
| | T-AGRtu.nos | A 3′ non-translated region of | 11066-11318 |
| | | the nopaline synthase gene of | |
| | | Agrobacterium tumefaciens Ti- | |
| | | plasmid which functions to | |
| | | direct polyadenylation of the | |
| | | mRNA. | |
| Agro T-DNA | B-AGRtu.left border | Agro left border sequence, | 10-451 |
| transfer | | essential for transfer of T- | |
| | | DNA. | |
| Maintenance | OR-Ec.oriV-RK2 | The vegetative origin of | 538-934 |
| in E. coli | | replication from plasmid RK2. | |
| | CR-Ec.rop | Coding region for repressor of | 2443-2634 |
| | | primer from the ColE1 | |
| | | plasmid. Expression of this | |
| | | gene product interferes with | |
| | | primer binding at the origin of | |
| | | replication, keeping plasmid | |
| | | copy number low. | |
| | OR-Ec.ori-ColE1 | The minimal origin of | 3062-3650 |
| | | replication from the E. coli | |
| | | plasmid ColE1. | |
| | P-Ec.aadA-SPC/STR | Promoter for Tn7 | 4181-4222 |
| | | adenylyltransferase (AAD | |
| | | (3″)) | |
| | CR-Ec.aadA-SPC/STR | Coding region for Tn7 | 4223-5011 |
| | | adenylyltransferase (AAD | |
| | | (3″)) conferring | |
| | | spectinomycin and | |
| | | streptomycin resistance. | |
| | T-Ec.aadA-SPC/STR | 3′ UTR from the Tn7 | 5012-5069 |
| | | adenylyltransferase (AAD | |
| | | (3″)) gene of E. coli. | |

[0062] Primers for PCR amplification of protein coding nucleotides of recombinant DNA are designed at or near the start and stop codons of the coding sequence, in order to eliminate most of the 5′ and 3′ untranslated regions. Each recombinant DNA coding for a protein identified in Table 1 is amplified by PCR prior to insertion into the insertion site within the gene of interest expression cassette of one of the base vectors as referenced in Table 1.

TABLE 4

| Base | |
|---|---|
| Vector ID | |
| | Base Vector for Corn |
| 1 | pMON74577 |
| 2 | pMON82060 |
| 3 | pMON82921 |
| 4 | pMON92705 |
| 5 | pMON92708 |
| 6 | pMON92712 |
| 7 | pMON92713 |
| 8 | pMON92715 |
| 9 | pMON92716 |
| 10 | pMON92718 |
| 11 | pMON92719 |
| 12 | pMON92722 |
| 13 | pMON92724 |
| 14 | pMON92725 |
| 15 | pMON93039 |
| 16 | pMON93043 |
| | Base Vector for |
| | Soybean And Canola |
| 17 | pMON82053 |
| 18 | pMON92669 |
| 19 | pMON92671 |
| 20 | pMON99006 |

TABLE 5

| | | SEQ ID | | SEQ ID | | SEQ ID |
|---|---|---|---|---|---|---|
| Vector | Promoter | NO | Leader | NO | Intron | NO |
| pMON74577 | P-Hv.Per1 | 2167 | L-Hv.Per1 | 2182 | I-Zm.DnaK | 2197 |
| pMON82053 | P-CaMV.35S-enh | 2168 | NONE | / | NONE | / |
| pMON82060 | P-Os.Act1 | 2169 | L-Os.Act1 | 2183 | I-Os.Act1 | 2198 |
| pMON82921 | P-Zm.Cik 1 | 2170 | L-Zm.Cik 1 | 2184 | I-Zm.Cik 1 | 2199 |
| pMON92705 | P-Os.Act1 | 2169 | L-Os.Act1 | 2183 | I-Os.Act1 | 2198 |
| pMON92708 | P-Zm.CA4H | 2171 | L-Zm.CA4H | 2185 | NONE | / |
| pMON92712 | P-Os.Cut1 | 2172 | L-Os.Cut1 | 2186 | I-Zm.DnaK | 2197 |
| pMON92713 | P-Zm.P39486 | 2173 | L-Zm.39486 | 2187 | I-Zm.DnaK | 2197 |
| pMON92715 | P-Hv.Per1 | 2167 | L-Hv.Per1 | 2182 | I-Zm.DnaK | 2197 |
| pMON92716 | P-Zm.FDA | 2174 | L-Zm.FDA | 2188 | I-Zm.DnaK | 2197 |
| pMON92718 | P-Zm.Cik 1 | 2170 | L-Zm.Cik1 | 2184 | I-Zm.Cik1 | 2199 |
| pMON92719 | P-Zm.RAB17 | 2175 | L- | 2189 | I-Zm.DnaK | 2197 |
| | | | Zm.RAB17 | | | |
| pMON92722 | P-CaMV.35S-enh | 2168 | L- | 2190 | I-Zm.DnaK | 2197 |
| | | | CaMV.35S | | | |
| pMON92724 | P-Zm.-636aldolase-0:1:2 + | 2176 | L-Zm.PPDK | 2191 | I-Zm.DnaK | 2197 |
| | P-Zm.PPDK | | | | | |
| pMON93039 | E-Os.Act1 + E- | 2177 | L-Ta.Lhcb1 | 2192 | I-Os.Act1 | 2198 |
| | CaMV.35S.2xA1-B3 + P- | | | | | |
| | Os.Act1 | | | | | |
| pMON93043 | P-Zm.EM | 2178 | L-Zm.EM | 2193 | I-Zm.DnaK | 2197 |
| pMON92669 | P-At.Rca | 2179 | L-At.Rca | 2194 | NONE | / |
| pMON92671 | P-At.SAMS3 | 2180 | L- | 2195 | I-At.SAMS3 | 2200 |
| | | | At.SAMS3 | | | |
| pMON99006 | P-CaMV.35S-enh | 2168 | NONE | / | NONE | / |
| PM0N92725 | P-Zm.HRGP | 2181 | L-Zm.HRGP | 2196 | I-Zm.DnaK | 2197 |

[0063] B. Plasmids for use in transformation of soybean and canola are also prepared. Elements of all exemplary common expression vector plasmid pMON82053 are shown in Table 6 below and FIG. 4.

TABLE 6

| | | | Coordinates |
|---|---|---|---|
| | | | of SEQ ID |
| Function | Name | Annotation | NO: 2204 |
| Agro T-DNA | B-AGRtu.left | Agro left border sequence, essential for | 6144-6585 |
| transfer | border | transfer of T-DNA. | |
| Plant selectable | P-At.Act7 | Promoter from the Arabidopsis actin 7 | 6624-7861 |
| marker | | gene | |
| expression | L-At.Act7 | 5′ UTR of Arabidopsis Act7 gene | |
| cassette | I-At.Act7 | Intron from the Arabidopsis actin7 gene | |
| | TS-At.ShkG-CTP2 | Transit peptide region of Arabidopsis | 7864-8091 |
| | | EPSPS | |
| | CR-AGRtu.aroA- | Synthetic CP4 coding region with dicot | 8092-9459 |
| | CP4.nno_At | preferred codon usage. | |
| | T-AGRtu.nos | A 3′ non-translated region of the | 9466-9718 |
| | | nopaline synthase gene of | |
| | | Agrobacterium tumefaciens Ti plasmid | |
| | | which functions to direct | |
| | | polyadenylation of the mRNA. | |
| Gene of interest | P-CaMV.35S-enh | Promoter for 35S RNA from CaMV | 1-613 |
| expression | | containing a duplication of the −90 to −350 | |
| cassette | | region. | |
| | T-Gb.E6-3b | 3′ untranslated region from the fiber | 688-1002 |
| | | protein E6 gene of sea-island cotton; | |
| Agro T-DNA | B-AGRtu.right | Agro right border sequence, essential | 1033-1389 |
| transfer | border | for transfer of T-DNA. | |
| Maintenance in | OR-Ec.oriV-RK2 | The vegetative origin of replication | 5661-6057 |
| E. coli | | from plasmid RK2. | |
| | CR-Ec.rop | Coding region for repressor of primer | 3961-4152 |
| | | from the ColE1 plasmid. Expression of | |
| | | this gene product interferes with primer | |
| | | binding at the origin of replication, | |
| | | keeping plasmid copy number low. | |
| | OR-Ec.ori-ColE1 | The minimal origin of replication from | 2945-3533 |
| | | the E. coli plasmid ColE1. | |
| | P-Ec.aadA- | Promoter for Tn7 adenylyltransferase | 2373-2414 |
| | SPC/STR | (AAD (3″)) | |
| | CR-Ec.aadA- | Coding region for Tn7 | 1584-2372 |
| | SPC/STR | adenylyltransferase (AAD (3″)) | |
| | | conferring spectinomycin and | |
| | | streptomycin resistance. | |
| | T-Ec.aadA- | 3′ UTR from the Tn7 | 1526-1583 |
| | SPC/STR | adenylyltransferase (AAD (3″)) gene of | |
| | | E. coli. | |

[0064] Primers for PCR amplification of protein coding, nucleotides of recombinant DNA are designed at or near the start and stop codons of the coding sequence, in order to eliminate most of the 5′ and 3′ untranslated regions. Each recombinant DNA coding for a protein identified in Table 1 is amplified by PCR prior to insertion into the insertion site within the gene of interest expression cassette of one of the base vectors as referenced in Table 1.

[0065] C. Cotton Transformation Vector

[0066] Recombinant DNA constructs for use in transformation of cotton are also prepared. Elements of an exemplary common expression vector plasmid pMON99053 are shown in Table 7 below and FIG. 5. Primers for PCR amplification of protein coding nucleotides of recombinant DNA are designed at or near the start and stop codons of the coding sequence, in order to eliminate most of the 5′ and 3 untranslated regions. Each recombinant DNA coding for a protein identified in Table 1 is amplified by PCR prior to insertion into the insertion site within the gene of interest expression cassette of the base vector in Table 7.

TABLE 7

| | | | Coordinates of |
|---|---|---|---|
| | | | SEQ ID NO: |
| Function | Name | Annotation | 2205 |
| Agrobacterium | B-AGRtu.right border | Agro right border sequence, | 1-357 |
| T-DNA transfer | | essential for transfer of T- | |
| | | DNA. | |
| Gene of interest | Exp-CaMV.35S-enh + Ph.DnaK | Enhanced version of the 35S | 388-1091 |
| expression | | RNA promoter from CaMV | |
| cassette | | plus the petunia hsp70 5′ | |
| | | untranslated region | |
| | T-Ps.RbcS2-E9 | The 3′ non-translated region of | 1165-1797 |
| | | the pea RbcS2 gene which | |
| | | functions to direct | |
| | | polyadenylation of the mRNA. | |
| Plant selectable | Exp-CaMV.35S | Promoter and 5′ untranslated | 1828-2151 |
| marker | | region from the 35S RNA of | |
| expression | | CaMV | |
| cassette | CR-Ec.npt11-Tn5 | Coding region for neomycin | 2185-2979 |
| | | phosphotransferase gene from | |
| | | transposon Tn5 which confers | |
| | | resistance to neomycin and | |
| | | kanamycin. | |
| | T-AGRtu.nos | A 3′ non-translated region of | 3011-3263 |
| | | the nopaline synthase gene of | |
| | | Agrobacterium tumefaciens Ti | |
| | | plasmid which functions to | |
| | | direct polyadenylation of the | |
| | | mRNA. | |
| Agrobacterium | B-AGRtu.left border | Agro left border sequence, | 3309-3750 |
| T-DNA transfer | | essential for transfer of T- | |
| | | DNA. | |
| Maintenance in | OR-Ec.oriV-RK2 | The vegetative origin of | 3837-4233 |
| E. coli | | replication from plasmid RK2. | |
| | CR-Ec.rop | Coding region for repressor of | 5742-5933 |
| | | primer from the ColE1 | |
| | | plasmid. Expression of this | |
| | | gene product interferes with | |
| | | primer binding at the origin of | |
| | | replication, keeping plasmid | |
| | | copy number low. | |
| | OR-Ec.ori-ColE1 | The minimal origin of | 6361-6949 |
| | | replication from the E. coli | |
| | | plasmid ColE1. | |
| | P-Ec.aadA-SPC/STR | Promoter for Tn7 | 7480-7521 |
| | | adenylyltransferase | |
| | | (AAD(3″)) | |
| | CR-Ec.aadA-SPC/STR | Coding region for Tn7 | 7522-8310 |
| | | adenylyltransferase | |
| | | (AAD(3″)) conferring | |
| | | spectinomycin and | |
| | | streptomycin resistance. | |
| | T-Ec.aadA-SPC/STR | 3′ UTR from the Tn7 | 8311-8368 |
| | | adenylyltransferase | |
| | | (AAD(3″)) gene of E. coli. | |

### EXAMPLE 2

### Corn Transformation

[0067] This example illustrates the production and identification of transgenic corn cells in seed of transgenic corn plants having an enhanced agronomic trait, i.e. enhanced nitrogen use efficiency, increased yield, enhanced water use efficiency, enhanced tolerance to cold and/or improved seed compositions as compared to control plants. Transgenic corn cells are prepared with recombinant DNA construct expressing each of the protein encoding DNAs listed in Table 1 by Agrobacterium-mediated transformation using the corn transformation vectors as disclosed in Example 1. Corn transformation is effected using methods disclosed in U.S. Patent Application Publication 2004/0344075 A1 where corn embryos are inoculated and co-cultured with the Agrobacterium tumefaciens strain ABI and the corn transformation vector. To regenerate transgenic corn plants the transgenic callus resulting from transformation is placed on media to initiate shoot development in plantlets which are transferred to potting soil for initial growth in a growth chamber followed by a mist bench before transplanting to pots where plants are grown to maturity. The plants are self fertilized and seed is harvested for screening as seed, seedlings or progeny R2 plants or hybrids, e.g., for yield trials in the screens indicated above.

[0068] Many transgenic events which survive to fertile transgenic plants that produce seeds and progeny plants do not exhibit an enhanced agronomic trait. The transgenic plants and seeds having the transgenic cells of this invention which have recombinant DNA imparting the enhanced agronomic traits are identified by screening for nitrogen use efficiency, yield, water use efficiency, cold tolerance and improved seed composition as reported in Example 7.

### EXAMPLE 3

### Soybean Transformation

[0069] This example illustrates the production and identification of transgenic soybean cells in seed of transgenic soybean plants having an enhanced agronomic trait, i.e. enhanced nitrogen use efficiency, increased yield, enhanced water use efficiency, enhanced tolerance to cold and/or improved seed compositions as compared to control plants. Transgenic soybean cells are prepared with recombinant DNA expressing each of the protein encoding DNAs listed in Table 1 by Agrobacterium-mediated transformation using the soybean transformation vectors disclosed in Example 1. Soybean transformation is effected using methods disclosed in U.S. Pat. No. 6,384,301 where soybean meristem explants are wounded then inoculated and co-cultured with the soybean transformation vector, then transferred to selection media for 6-8 weeks to allow selection and growth of transgenic shoots.

[0070] Transgenic shoots producing roots are transferred to the greenhouse and potted in soil. Many transgenic events which survive to fertile transgenic plants that produce seeds and progeny plants do not exhibit an enhanced agronomic trait. The transgenic plants and seeds having the transgenic cells of this invention which have recombinant DNA imparting the enhanced agronomic traits are identified by screening for nitrogen use efficiency, yield, water use efficiency, cold tolerance and improved seed composition as reported in Example 7.

### EXAMPLE 4

### Cotton Transgenic Plants with Enhanced Agronomic Traits

[0071] Cotton transformation is performed as generally described in WO0036911 and in U.S. Pat. No. 5,846,797. Transgenic cotton plants containing each of the recombinant DNA construct having a sequence of SEQ ID NO: 1 through SEQ ID NO: 95 are obtained by transforming with recombinant DNA from each of the genes identified in Table 1. Progeny transgenic plants are selected from a population of transgenic cotton events under specified growing conditions and are compared with control cotton plants. Control cotton plants are substantially the same cotton genotype but without the recombinant DNA, for example, either a parental cotton plant of the same genotype that was not transformed with the identical recombinant DNA or a negative isoline of the transformed plant. Additionally, a commercial cotton cultivar adapted to the geographical region and cultivation conditions, i.e. cotton variety ST474, cotton variety FM 958, and cotton variety Siokra L-23, are used to compare the relative performance of the transgenic cotton plants containing, the recombinant DNA. The specified culture conditions are growing a first set of transgenic and control plants under “wet” conditions, i.e. irrigated in the range of 85 to 100 percent of evapotranspiration to provide leaf water potential of −14 to −18 bars, and grow me a second set of transgenic and control plants under “dry” conditions, i.e. irrigated in the range of 40 to 60 percent of evapotranspiration to provide a leaf water potential of −21 to −25 bars. Pest control, such as weed and insect control is applied equally to both wet and dry treatments as needed. Data gathered during the trial includes weather records throughout the growing season including detailed records of rainfall; soil characterization information; any herbicide or insecticide applications; any gross agronomic differences observed such as leaf morphology, branching habit, leaf color, time to flowering, and fruiting pattern; plant height at various points during the trial; stand density; node and fruit number including node above white flower and node above crack boll measurements; and visual wilt scoring. Cotton boll samples are taken and analyzed for lint fraction and fiber quality. The cotton is harvested at the normal harvest timeframe for the trial area. Enhanced water use efficiency is indicated by increased yield, improved relative water content, enhanced leaf water potential, increased biomass, enhanced leaf extension rates, and improved fiber parameters.

[0072] The transgenic cotton plants of this invention are identified from among the transgenic cotton plants by agronomic trait screening as having increased yield and enhanced water use efficiency.

### EXAMPLE 5

### Canola Transformation

[0073] This example illustrates plant transformation useful in producing the transgenic canola plants of this invention and the production and identification of transgenic seed for transgenic canola having enhanced water use efficiency, enhanced cold tolerance, increased yield, enhanced nitrogen use efficiency, enhanced seed protein and enhanced seed oil.

[0074] Tissues from in vitro grown canola seedlings are prepared and inoculated with overnight-grown Agrobacterium cells containing the recombinant DNA construct containing the DNA segment for the gene of interest cassette and a plant selectable marker cassette. Following co-cultivation with Agrobacterium, the infected tissues are allowed to grow on selection to promote growth of transgenic shoots, followed by growth of roots from the transgenic shoots. The selected plantlets are then transferred to the greenhouse and potted in soil. Molecular characterization are performed to confirm the presence of the gene of interest, and its expression in transgenic plants and progenies. Progeny transgenic plants are selected from a population of transgenic canola events under specified growing conditions and are compared with control canola plants: Control canola plants are substantially the same canola genotype but without the recombinant DNA, for example, either a parental canola plant of the same genotype that is not transformed with the identical recombinant DNA or a negative isoline of the transformed plant

[0075] Transgenic canola plant cells are transformed with recombinant DNA construct from each of the genes identified in Table 1. Transgenic progeny plants and seed of the transformed plant cells are screened for enhanced water use efficiency, enhanced cold tolerance, increased yield, enhanced nitrogen use efficiency, enhanced seed protein and enhanced seed oil as reported in Example 7.

### EXAMPLE 6

### Homolog Identification

[0076] This example illustrates the identification of homologs of proteins encoded by the DNA identified in Table 1 which is used to provide transgenic seed and plants having enhanced agronomic traits. From the sequence of the homologs, homologous DNA sequence can be identified for preparing additional transgenic seeds and plants of this invention with enhanced agronomic traits.

[0077] An “All Protein Database” was constructed of known protein sequences using a proprietary sequence database and the National Center for Biotechnology Information (NCBI) non-redundant amino acid database (nr.aa). For each organism from which a polynucleotide sequence provided herein was obtained, an “Organism Protein Database” was constructed of known protein sequences of the organism; it is a subset of the All Protein Database based on the NCBI taxonomy ID for the organism.

[0078] The All Protein Database was queried using amino acid sequences provided herein as SEQ ID NO: 96 through SEQ ID NO: 193 using NCBI “blastp” program with E-value cutoff of 1e-8. Up to 1000 top hits were kept, and separated by organism names. For each organism other than that of the query sequence, a list was kept for hits from the query organism itself with a more significant E-value than the best hit of the organism. The list contains likely duplicated genes of the polynucleotides provided herein, and is referred to as the Core List. Another list was kept for all the hits from each organism, sorted by E-value, and referred to as the Hit List.

[0079] The Organism Protein Database was queried using polypeptide sequences provided herein as SEQ ID NO: 96 through SEQ ID NO: 193 using NCBI “blastp” program with E-value cutoff of 1e-4. Up to 1000 top hits were kept. A BLAST searchable database was constructed based on these hits, and is referred to as “SubDB”. SubDB was queried with each sequence in the Hit List using NCBI “blastp” program with E-value cutoff of 1e-8. The hit with the best E-value was compared with the Core List from the corresponding organism. The hit is deemed a likely ortholog if it belongs to the Core List, otherwise it is deemed not a likely ortholog and there is no further search of sequences in the Hit List for the same organism. Homologs from a large number of distinct organisms were identified and are reported by amino acid sequences of SEQ ID NO: 194 through SEQ ID NO: 2166. The relationship of proteins of SEQ ID NO: 96 through 193 and homologs of SEQ ID NO: 194 through 2166 is identified in Table 8. The source organisms for each homolog is found in the Sequence Listing.

TABLE 8
PEP SEQ ID NO: homolog SEQ ID Nos

| | | | | | | | | | | | | |
|---|---|---|---|---|---|---|---|---|---|---|---|---|
| 96: | 1993 | 479 | 2151 | 697 | 1028 | 1041 | 1751 | 979 | 522 | 1247 | | |
| 97: | 747 | 592 | 1014 | 1740 | 1904 | 1641 | 1354 | 1207 | 2134 | 1569 | 1635 | 407 |
| | 602 | 635 | 397 | 2029 | 975 | | | | | | | |
| 98: | 1246 | 1099 | 1100 | 2152 | 1152 | 1301 | 1474 | 1462 | 1994 | 1196 | 737 | 736 |
| | 324 | 1078 | 1076 | 615 | 339 | 322 | 335 | 775 | 608 | 611 | 613 | 1745 |
| | 1744 | 1742 | 1697 | 486 | 2049 | 1971 | 454 | 1472 | 789 | 1829 | 1058 | 1941 |
| | 368 | 574 | 1555 | 1416 | 1228 | 1020 | 456 | 205 | 1081 | 2047 | 1746 | 489 |
| | 821 | 1409 | 2081 | 534 | 330 | 1884 | 2138 | 1748 | 1621 | 1361 | 1505 | 1199 |
| | 1985 | 1756 | 371 | 693 | 1702 | 1287 | 1766 | 1571 | 1573 | 550 | 552 | 1726 |
| | 1891 | 1727 | 1633 | 634 | 253 | 457 | 288 | 290 | 398 | 405 | 401 | 1516 |
| | 1356 | 2038 | 551 | 417 | 1553 | 2055 | 863 | 1284 | 1282 | 1917 | 1102 | 735 |
| | 768 | 531 | 720 | 616 | 466 | 772 | 1708 | | | | | |
| 99: | 1041 | 1906 | 491 | 927 | 1788 | 1116 | 404 | 1636 | 1231 | 1676 | 1684 | 139 |
| | 136 | 135 | 133 | 1132 | 1026 | | | | | | | |
| 100: | 1041 | 1906 | 491 | 927 | 1788 | 1116 | 404 | 1636 | 1231 | 1676 | 1684 | 139 |
| | 136 | 135 | 133 | 1132 | 1026 | | | | | | | |
| 101: | 894 | 956 | 458 | 1085 | 809 | 1448 | 102 | 1855 | 797 | 1620 | 714 | 505 |
| | 1339 | 927 | 715 | 979 | 1805 | 639 | 384 | 578 | | | | |
| 102: | 956 | 1085 | 458 | 809 | 1145 | 1448 | 505 | 927 | 715 | 570 | 459 | 1018 |
| | 1104 | 477 | 810 | 455 | 654 | 101 | 578 | 1704 | | | | |
| 103: | 1041 | 1906 | 491 | 927 | 1788 | 1116 | 404 | 1636 | 1231 | 1676 | 1684 | 139 |
| | 136 | 135 | 133 | 1132 | 1026 | | | | | | | |
| 104: | 781 | 1325 | 2061 | 1348 | 1350 | 1346 | 467 | 256 | 903 | 915 | 1759 | 1882 |
| | 1432 | 1433 | 734 | 669 | 1639 | 575 | 1203 | 544 | 525 | 1547 | 970 | 1403 |
| | 1665 | 1366 | 652 | 1566 | 920 | 1984 | 470 | 319 | 1288 | 1290 | 1375 | 1296 |
| | 1395 | 1328 | 1330 | 1311 | 292 | 661 | 2131 | 2146 | 2085 | 542 | 916 | 1519 |
| | 1367 | 1364 | 1313 | 1314 | 1324 | 1355 | 1352 | 1293 | 1294 | 1378 | 1401 | 1399 |
| | 1310 | 2068 | 2082 | 1160 | 1773 | | | | | | | |
| 105: | 1497 | 1872 | 730 | 361 | 732 | 2066 | 1954 | 690 | 201 | 1359 | 473 | 1879 |
| | 745 | 1129 | 411 | 415 | 1715 | 2144 | 1074 | 1476 | 1417 | | | |
| 106: | 806 | 869 | 1412 | 264 | 265 | 248 | 246 | 1096 | 286 | 312 | 238 | 1864 |
| | 1860 | 1243 | 1261 | 744 | 428 | 930 | 496 | 629 | 851 | 852 | 2148 | 497 |
| | 516 | 933 | 1814 | 1478 | 1463 | 573 | 377 | 641 | 867 | 665 | 221 | 1455 |
| | 991 | 653 | 601 | 1524 | 1418 | 526 | 883 | 2110 | 1185 | 1368 | 1630 | 1441 |
| | 2004 | 1771 | 919 | 1098 | 1138 | 424 | 1731 | 1379 | 413 | 1186 | 778 | 833 |
| | 1172 | 2034 | 1607 | 1791 | 147 | 144 | 143 | 887 | 504 | 988 | 228 | 936 |
| | 499 | 1931 | 403 | 382 | 609 | 680 | 733 | 982 | 1725 | 1713 | 1711 | 1710 |
| | 414 | 1044 | | | | | | | | | | |
| 107: | 1369 | 1400 | 831 | 344 | 218 | 588 | 1863 | 1489 | 2031 | 1450 | 375 | 1709 |
| | 798 | 1837 | 1681 | 543 | 1500 | 1005 | 1159 | 1900 | | | | |
| 108: | 1936 | 853 | 1935 | 2105 | 350 | 594 | 893 | 2101 | 1268 | 1233 | 866 | 1422 |
| 109: | 1151 | 1167 | 1166 | 1178 | 1358 | 630 | 500 | 538 | 535 | 1413 | 1564 | 1721 |
| | 198 | 1898 | 723 | 1411 | 1019 | 1316 | 1331 | 1318 | 1999 | 2007 | 1822 | 519 |
| | 709 | 329 | 840 | 1511 | 1502 | 766 | 671 | 1951 | 1436 | 501 | 610 | 612 |
| | 539 | 1414 | 648 | 1263 | 997 | | | | | | | |
| 110: | 769 | 1861 | 1156 | 1828 | 1093 | 568 | 677 | 1659 | 252 | 250 | 370 | 276 |
| | 197 | 1133 | 275 | 262 | 261 | 259 | 257 | 241 | 239 | 236 | 889 | 1012 |
| | 1209 | | | | | | | | | | | |
| 111: | 781 | 1325 | 2061 | 1348 | 1350 | 1346 | 1332 | 196 | 903 | 915 | 1759 | 1882 |
| | 1639 | 2006 | 667 | 2035 | 652 | 1566 | 1169 | 830 | 1220 | 2051 | 920 | 470 |
| | 1105 | 1103 | 1290 | 1288 | 1375 | 1370 | 1296 | 1395 | 1328 | 1330 | 1311 | 509 |
| | 579 | 1488 | 628 | 292 | 1875 | 952 | 1504 | 1803 | 779 | 1430 | 285 | 1857 |
| | 1598 | 1718 | 796 | 1101 | 1739 | 423 | 542 | 916 | 1519 | 945 | 1313 | 1364 |
| | 1367 | 1324 | 1314 | 1352 | 1355 | 1293 | 1294 | 1378 | 1401 | 1399 | 1310 | 2082 |
| | 2068 | 1597 | 1160 | 1773 | 1599 | 1586 | 1582 | 1976 | 1580 | 1722 | 1545 | |
| 112: | 823 | 1253 | 1750 | 247 | 1859 | 1753 | 2147 | 1752 | 1544 | 688 | 1631 | 1347 |
| | 1769 | 875 | 510 | 503 | 1663 | 374 | 722 | 752 | 942 | 2128 | 512 | 987 |
| | 1298 | 1066 | | | | | | | | | | |
| 113: | 1396 | 1221 | 433 | 326 | 406 | 2093 | 1273 | 1670 | 1655 | 1672 | 2031 | 1147 |
| | 338 | 1712 | 553 | 619 | 986 | 1479 | 792 | 1837 | 1681 | 543 | 741 | |
| 114: | 1144 | 1143 | 1813 | 386 | 995 | 502 | 708 | 707 | 1886 | 206 | 1007 | 1279 |
| | 1809 | 1389 | 1657 | 1644 | 882 | 1075 | 1069 | 911 | 1867 | 1023 | 223 | 1934 |
| | 1541 | 356 | 1960 | 2062 | 914 | 1051 | 2057 | 672 | 476 | 394 | 438 | 1637 |
| | 605 | 1079 | 1513 | 1795 | 1862 | 2028 | 1970 | 1983 | 646 | 304 | 971 | 1577 |
| | 1539 | 755 | 1624 | 1895 | 2098 | 913 | | | | | | |
| 115: | 800 | 2016 | 213 | 1056 | 254 | 799 | 1217 | 600 | 334 | 848 | 1134 | 444 |
| | 185 | 1950 | 2046 | 1468 | 1888 | 1124 | 1923 | 953 | 985 | 1587 | 1000 | 999 |
| | 1001 | 716 | 1877 | 828 | 1887 | 1937 | 621 | | | | | |
| 116: | 800 | 2016 | 213 | 1056 | 799 | 1217 | 848 | 600 | 334 | 1134 | 444 | 1139 |
| | 185 | 1950 | 904 | 985 | 1587 | 1000 | 999 | 372 | 1162 | 1887 | 1937 | 1768 |
| | 1091 | | | | | | | | | | | |
| 117: | 203 | 711 | 1833 | 1765 | 1956 | 1295 | 410 | 1050 | 822 | 1496 | 1781 | 762 |
| | 1095 | 981 | 1006 | 1097 | 1827 | 1611 | 1632 | 559 | 527 | 1512 | 445 | 1473 |
| 118: | 853 | 1935 | 2105 | 393 | 1499 | 993 | 1595 | 1514 | 478 | 299 | 1873 | 1148 |
| | 893 | 1552 | 803 | 2090 | 1646 | 1533 | 1615 | 1260 | 866 | | | |
| 119: | 1517 | 1030 | 1583 | 359 | 655 | 1521 | 327 | 1276 | 815 | 1323 | 245 | 318 |
| | 962 | 2078 | 549 | 888 | 296 | 2084 | 513 | 422 | 378 | 1398 | 1501 | 1785 |
| | 679 | 2037 | 864 | 1986 | 390 | 463 | 1525 | 1576 | 306 | 1674 | 1245 | 380 |
| | 1142 | 367 | 1821 | 1437 | 767 | 923 | 1878 | 2043 | 1381 | 1678 | 465 | 1550 |
| | 1618 | 902 | 137 | | | | | | | | | |
| 120: | 150 | 121 | 1491 | 1380 | | | | | | | | |
| 121: | 120 | 150 | 1491 | 1380 | | | | | | | | |
| 122: | 659 | 1724 | 1835 | 507 | 1242 | 836 | 738 | 895 | 1572 | 1625 | 1218 | 879 |
| | 1990 | 365 | 1299 | 1425 | 597 | 790 | 1338 | 1945 | 1691 | 1737 | 2129 | 1690 |
| | 924 | 791 | 855 | 123 | 2154 | 1852 | 837 | 1981 | 2112 | | | |
| 123: | 659 | 1724 | 1835 | 507 | 1242 | 836 | 738 | 895 | 1572 | 1625 | 1218 | 879 |
| | 1990 | 365 | 1299 | 1425 | 597 | 790 | 1338 | 1945 | 1691 | 1737 | 2129 | 1690 |
| | 924 | 791 | 855 | 122 | 211 | 2154 | 1852 | 837 | 1981 | 2112 | | |
| 124: | 1177 | 1754 | 521 | 1254 | 2067 | 471 | 2012 | 1673 | 834 | 1280 | 1464 | 400 |
| | 807 | 622 | 1027 | 1939 | 1556 | 426 | 565 | 1360 | 1452 | 493 | 1569 | 1200 |
| | 1892 | 321 | 2071 | 427 | 1831 | 1557 | 1701 | 1890 | 1889 | 785 | 1334 | 1149 |
| | 1255 | 1438 | 1554 | 1838 | | | | | | | | |
| 125: | 1475 | 1302 | 388 | 2165 | 2070 | 2073 | 2065 | 865 | 1077 | 484 | 589 | 487 |
| | 604 | 1067 | 1068 | 760 | 994 | 585 | 495 | 890 | 1885 | 876 | 1285 | 2033 |
| | 222 | 1762 | 1015 | 801 | 839 | 842 | 1871 | 844 | 435 | 857 | 859 | 650 |
| | 1237 | 1238 | 861 | 1111 | 2111 | 432 | 694 | 1929 | 314 | 1170 | 1942 | 1908 |
| | 1560 | 1216 | 1964 | 537 | 311 | 825 | 841 | 1530 | 1002 | 1909 | 443 | 1682 |
| | 664 | 572 | 2083 | 1070 | 1153 | | | | | | | |
| 126: | 894 | 956 | 2013 | 430 | 1041 | 1448 | 713 | 1021 | 591 | 325 | 786 | 928 |
| | 1034 | 1522 | 1506 | 1743 | 1905 | 522 | | | | | | |
| 127: | 1503 | 1108 | 1543 | 1315 | 1881 | 1922 | 1239 | 2030 | 266 | 873 | | |
| 128: | 1528 | 387 | 206 | 1007 | 271 | 607 | 1692 | 1991 | 1848 | 1345 | 963 | 1651 |
| | 1213 | 249 | 1903 | 402 | 186 | 153 | 773 | 1901 | 1874 | 412 | 1190 | 480 |
| | 1297 | 1003 | 1122 | 898 | 1540 | 660 | 564 | 1616 | 1051 | 555 | 683 | 1987 |
| | 273 | 244 | 672 | 438 | 1384 | 1520 | 698 | 793 | 2052 | 1173 | 756 | 336 |
| | 1269 | 1094 | 2145 | 1234 | 1807 | 943 | 1949 | 776 | 704 | 1486 | 1961 | 1776 |
| | 482 | 625 | 1775 | 483 | 1526 | | | | | | | |
| 129: | 1528 | 387 | 206 | 1007 | 271 | 607 | 1692 | 1991 | 1848 | 1345 | 963 | 1651 |
| | 1213 | 249 | 1903 | 402 | 186 | 153 | 773 | 1901 | 1874 | 412 | 1190 | 480 |
| | 1297 | 1003 | 1122 | 898 | 1540 | 660 | 564 | 1616 | 1051 | 555 | 683 | 1987 |
| | 273 | 244 | 672 | 438 | 1384 | 1520 | 698 | 793 | 2052 | 1173 | 756 | 336 |
| | 1269 | 1094 | 2145 | 1234 | 1807 | 943 | 1949 | 776 | 704 | 1486 | 1961 | 1776 |
| | 482 | 625 | 1775 | 483 | 1526 | | | | | | | |
| 130: | 1528 | 387 | 206 | 1007 | 271 | 607 | 1692 | 1991 | 1848 | 1345 | 963 | 1651 |
| | 1213 | 249 | 1903 | 402 | 186 | 153 | 773 | 1901 | 1874 | 412 | 1190 | 480 |
| | 1297 | 1003 | 1122 | 898 | 1540 | 660 | 564 | 1616 | 1051 | 555 | 683 | 1987 |
| | 273 | 244 | 672 | 438 | 1384 | 1520 | 698 | 793 | 2052 | 1173 | 756 | 336 |
| | 1269 | 1094 | 2145 | 1234 | 1807 | 943 | 1949 | 776 | 704 | 1486 | 1961 | 1776 |
| | 482 | 625 | 1775 | 483 | 1526 | | | | | | | |
| 131: | 1528 | 387 | 206 | 1007 | 271 | 607 | 1692 | 1991 | 1848 | 1345 | 963 | 1651 |
| | 1213 | 249 | 1903 | 402 | 186 | 153 | 773 | 1901 | 1874 | 412 | 1190 | 480 |
| | 1297 | 1003 | 1122 | 898 | 1540 | 660 | 564 | 1616 | 1051 | 555 | 683 | 1987 |
| | 273 | 244 | 672 | 438 | 1384 | 1520 | 698 | 793 | 2052 | 1173 | 756 | 336 |
| | 1269 | 1094 | 2145 | 1234 | 1807 | 943 | 1949 | 776 | 704 | 1486 | 1961 | 1776 |
| | 482 | 625 | 1775 | 483 | 1526 | | | | | | | |
| 132: | 1528 | 387 | 206 | 1007 | 271 | 607 | 1692 | 1991 | 1848 | 1345 | 963 | 1651 |
| | 1213 | 249 | 1903 | 402 | 186 | 153 | 773 | 1901 | 1874 | 412 | 1190 | 480 |
| | 1297 | 1003 | 1122 | 898 | 1540 | 660 | 564 | 1616 | 1051 | 555 | 883 | 1987 |
| | 273 | 244 | 672 | 438 | 1384 | 1520 | 698 | 793 | 2052 | 1173 | 756 | 336 |
| | 1269 | 1094 | 2145 | 1234 | 1807 | 943 | 1949 | 776 | 704 | 1486 | 1961 | 1776 |
| | 482 | 625 | 1775 | 483 | 1526 | | | | | | | |
| 133: | 956 | 1906 | 927 | 979 | 1788 | 1116 | 404 | 1636 | 1231 | 1026 | 103 | 100 |
| | 99 | 1834 | | | | | | | | | | |
| 134: | 1157 | 758 | 451 | 548 | 1281 | 832 | 1136 | 1816 | 1804 | 710 | 858 | 289 |
| | 618 | 1049 | 1933 | 532 | 1567 | 1256 | 878 | 620 | 1031 | 2118 | | |
| 135: | 956 | 1906 | 927 | 979 | 1788 | 1116 | 404 | 1636 | 1231 | 1026 | 103 | 100 |
| | 99 | 1834 | | | | | | | | | | |
| 136: | 956 | 1906 | 927 | 979 | 1788 | 1116 | 404 | 1636 | 1231 | 1026 | 103 | 100 |
| | 99 | 1834 | | | | | | | | | | |
| 137: | 1517 | 1030 | 1583 | 359 | 655 | 1521 | 327 | 1276 | 815 | 1323 | 245 | 318 |
| | 962 | 2078 | 549 | 888 | 296 | 2084 | 513 | 422 | 378 | 1398 | 1501 | 1785 |
| | 679 | 2037 | 864 | 1986 | 390 | 463 | 1525 | 1576 | 306 | 1874 | 1245 | 380 |
| | 1142 | 367 | 1821 | 1437 | 767 | 923 | 1878 | 2043 | 1381 | 1678 | 465 | 1550 |
| | 1618 | 902 | 119 | | | | | | | | | |
| 138: | 1144 | 708 | 202 | 364 | 1321 | 219 | 216 | 1541 | 356 | 603 | 488 | 587 |
| | 581 | 2126 | 394 | 438 | 1272 | 1666 | 225 | 651 | 1604 | 1602 | 989 | 1060 |
| | 1594 | 243 | 1082 | 1054 | 1970 | 1865 | | | | | | |
| 139: | 956 | 1906 | 927 | 979 | 1788 | 1116 | 404 | 1636 | 1231 | 1026 | 103 | 100 |
| | 99 | 1834 | | | | | | | | | | |
| 140: | 416 | 1799 | 662 | 298 | 1278 | 1126 | 1694 | 1176 | 1187 | 1819 | 2119 | 1397 |
| | 468 | 1664 | 1493 | 932 | 1393 | 1498 | 2088 | 1811 | 1259 | 1184 | 369 | 1008 |
| | 1009 | 1966 | 395 | 1036 | 1037 | 1039 | 1033 | 1995 | 1992 | 1040 | 1071 | 1065 |
| | 1155 | 1141 | 352 | 354 | 1926 | 1826 | 1661 | 1053 | 301 | 1642 | 233 | 1627 |
| | 2048 | 1593 | 1613 | 1483 | 1667 | 1010 | 437 | 1125 | 1080 | 1092 | 529 | 331 |
| | 347 | 1982 | 1165 | 1568 | 1542 | 1451 | | | | | | |
| 141: | 1320 | 2158 | 541 | 295 | 1150 | 984 | 284 | 743 | 1714 | 1728 | 2008 | 1136 |
| | 1823 | 847 | 1508 | 2115 | 2130 | 1121 | 1977 | 1802 | 481 | 1466 | 1244 | 1140 |
| | 717 | 1996 | 1979 | 461 | | | | | | | | |
| 142: | 806 | 1210 | 871 | 1412 | 248 | 265 | 264 | 246 | 2075 | 286 | 312 | 238 |
| | 1243 | 744 | 428 | 629 | 1131 | 2148 | 1110 | 1426 | 497 | 933 | 1814 | 1927 |
| | 1924 | 641 | 1918 | 1578 | 926 | 958 | 1847 | 1197 | 2096 | 939 | 1368 | 1630 |
| | 1441 | 886 | 490 | 1731 | 1729 | 782 | 557 | 1227 | 1419 | 1179 | 2045 | 1792 |
| | 1774 | 1186 | 1219 | 1423 | 977 | 1607 | 1791 | 1763 | 1761 | 1789 | 1777 | 682 |
| | 644 | 268 | 226 | 623 | 829 | 1793 | 1836 | 1265 | 1790 | 263 | 258 | 260 |
| | 731 | 566 | 1376 | 1720 | 447 | 1579 | 850 | 1953 | 676 | 849 | 1308 | 1869 |
| | 2092 | 567 | 967 | 2009 | 499 | 936 | 1931 | 403 | 382 | 609 | 680 | 733 |
| | 982 | 1725 | 1713 | 1711 | 1710 | 1693 | 1214 | | | | | |
| 143: | 806 | 1191 | 1194 | 869 | 868 | 1412 | 1303 | 264 | 265 | 248 | 246 | 1096 |
| | 286 | 312 | 315 | 238 | 1864 | 1860 | 1243 | 1261 | 744 | 428 | 930 | 496 |
| | 629 | 851 | 852 | 1127 | 1128 | 2148 | 497 | 516 | 933 | 1017 | 1814 | 1478 |
| | 1463 | 1212 | 573 | 377 | 641 | 653 | 601 | 867 | 991 | 1455 | 665 | 1524 |
| | 221 | 1418 | 526 | 883 | 2110 | 1185 | 1630 | 1368 | 1441 | 2004 | 1771 | 919 |
| | 1098 | 316 | 881 | 1138 | 424 | 816 | 1731 | 1792 | 1774 | 1186 | 464 | 778 |
| | 1916 | 1955 | 1219 | 827 | 826 | 724 | 1423 | 725 | 727 | 833 | 1172 | 2034 |
| | 977 | 1607 | 1791 | 228 | 106 | 1608 | 1044 | 1154 | 936 | 499 | 1931 | 403 |
| | 382 | 609 | 680 | 733 | 982 | 1725 | 1713 | 1711 | 1710 | 414 | 887 | |
| 144: | 806 | 1191 | 1194 | 869 | 868 | 1412 | 1303 | 264 | 265 | 248 | 246 | 1096 |
| | 286 | 312 | 315 | 238 | 1864 | 1860 | 1243 | 1261 | 744 | 428 | 930 | 496 |
| | 629 | 851 | 852 | 1127 | 1128 | 2148 | 497 | 516 | 933 | 1017 | 1814 | 1478 |
| | 1463 | 1212 | 573 | 377 | 641 | 653 | 601 | 867 | 991 | 1455 | 665 | 1524 |
| | 221 | 1418 | 526 | 883 | 2110 | 1185 | 1630 | 1368 | 1441 | 2004 | 1771 | 919 |
| | 1098 | 316 | 881 | 1138 | 424 | 816 | 1731 | 1792 | 1774 | 1186 | 464 | 778 |
| | 1916 | 1955 | 1219 | 827 | 826 | 724 | 1423 | 725 | 727 | 833 | 1172 | 2034 |
| | 977 | 1607 | 1791 | 228 | 106 | 1608 | 1044 | 1154 | 936 | 499 | 1931 | 403 |
| | 382 | 609 | 680 | 733 | 982 | 1725 | 1713 | 1711 | 1710 | 414 | 887 | |
| 145: | 1570 | 294 | 1640 | 2053 | 1248 | 1703 | 1252 | 547 | 1201 | 1362 | 1386 | 2132 |
| | 712 | 1327 | 453 | 363 | 1841 | 379 | 212 | 921 | 2060 | 1340 | 446 | 998 |
| | 891 | 961 | 627 | 1928 | 910 | 805 | 1064 | 1899 | 1469 | 2108 | 1716 | 237 |
| | 1972 | 1038 | 949 | 1732 | 1289 | 1808 | 1824 | 2010 | 695 | 560 | 1029 | 1946 |
| | 1089 | 657 | 1088 | 158 | 1730 | 328 | | | | | | |
| 146: | 769 | 281 | 279 | 282 | 267 | 1861 | 2102 | 978 | 1106 | 569 | 421 | 1638 |
| | 360 | 2143 | 370 | 2032 | 1283 | 276 | 272 | 270 | 261 | 241 | 275 | 262 |
| | 257 | 236 | 259 | 239 | 889 | 1012 | | | | | | |
| 147: | 806 | 1191 | 1194 | 869 | 868 | 1412 | 1303 | 264 | 265 | 248 | 246 | 1096 |
| | 286 | 312 | 315 | 238 | 1864 | 1860 | 1243 | 1261 | 744 | 428 | 930 | 496 |
| | 629 | 851 | 852 | 1127 | 1128 | 2148 | 497 | 516 | 933 | 1017 | 1814 | 1478 |
| | 1463 | 1212 | 573 | 377 | 641 | 653 | 601 | 867 | 991 | 1455 | 665 | 1524 |
| | 221 | 1418 | 526 | 883 | 2110 | 1185 | 1630 | 1368 | 1441 | 2004 | 1771 | 919 |
| | 1098 | 316 | 881 | 1138 | 424 | 816 | 1731 | 1792 | 1774 | 1186 | 464 | 778 |
| | 1916 | 1955 | 1219 | 827 | 826 | 724 | 1423 | 725 | 727 | 833 | 1172 | 2034 |
| | 977 | 1607 | 1791 | 228 | 106 | 1608 | 1044 | 1154 | 936 | 499 | 1931 | 403 |
| | 382 | 609 | 880 | 733 | 982 | 1725 | 1713 | 1711 | 1710 | 414 | 887 | |
| 148: | 210 | 1183 | 1548 | 1291 | 1471 | 2140 | 436 | 1120 | 1119 | 1115 | 1118 | 2141 |
| | 687 | 1656 | 1534 | 1286 | 905 | 1251 | 1372 | 313 | 1603 | 1300 | 638 | 1181 |
| | 1198 | 220 | | | | | | | | | | |
| 149: | 1277 | 524 | 955 | 658 | 1609 | 317 | 1180 | 1536 | 355 | 353 | 357 | 2005 |
| | 399 | 229 | 645 | 425 | 1561 | 1958 | 1894 | 1312 | 1940 | 1783 | 1250 | 1390 |
| | 1391 | 1507 | 917 | 227 | 640 | 996 | 2106 | 1446 | 518 | 1649 | 606 | 794 |
| | 520 | 1610 | 1492 | 1208 | 1223 | 1800 | 1851 | 1706 | 1914 | 2039 | 941 | 1870 |
| | 1698 | 434 | 2040 | 293 | 1778 | 1733 | 1322 | 1059 | 449 | 376 | 1846 | 2103 |
| | 1025 | 1107 | | | | | | | | | | |
| 150: | 120 | 121 | 1491 | 1380 | | | | | | | | |
| 151: | 696 | 333 | 1013 | 1336 | 1257 | 1606 | 804 | 392 | 506 | 835 | 1193 | 593 |
| | 1114 | 637 | 974 | 556 | 1734 | 906 | 701 | 1371 | 1086 | 1683 | 2095 | 1612 |
| | 862 | 1896 | 362 | 419 | 1974 | 813 | 765 | | | | | |
| 152: | 1369 | 1400 | 831 | 344 | 218 | 588 | 1863 | 1489 | 2031 | 1450 | 375 | 1709 |
| | 798 | 1837 | 1681 | 543 | 1500 | 1005 | 1159 | 1900 | | | | |
| 153: | 1144 | 1143 | 1813 | 386 | 995 | 502 | 1668 | 1007 | 1279 | 271 | 1651 | 1024 |
| | 1541 | 356 | 1540 | 660 | 1689 | 1051 | 488 | 2121 | 555 | 683 | 1987 | 581 |
| | 132 | 131 | 130 | 129 | 128 | 973 | 672 | 438 | 1272 | 1666 | 1384 | 1520 |
| | 698 | 1173 | 1513 | 336 | 1269 | 756 | 943 | 1949 | 776 | 243 | 1241 | 1970 |
| | 646 | 304 | 402 | | | | | | | | | |
| 154: | 1405 | 1794 | 1087 | 2097 | 1304 | 1035 | 681 | 969 | 1628 | 2163 | 2100 | 452 |
| | 1055 | 636 | 899 | 1083 | 885 | 2077 | 1549 | 582 | 1700 | 1947 | 1932 | 1084 |
| 155: | 781 | 1325 | 2061 | 1348 | 1350 | 1346 | 467 | 256 | 903 | 915 | 1432 | 1433 |
| | 1685 | 1688 | 1699 | 1669 | 1806 | 159 | 111 | 1224 | 1722 | 1645 | 748 | 1545 |
| | 1853 | 1707 | 345 | 1798 | 429 | 787 | 278 | 1639 | 901 | 2006 | 614 | 1236 |
| | 544 | 525 | 1547 | 667 | 1566 | 1169 | 1220 | 830 | 2051 | 920 | 1984 | 2036 |
| | 470 | 319 | 1105 | 1288 | 1290 | 1375 | 1296 | 1395 | 1328 | 1330 | 1311 | 579 |
| | 292 | 1875 | 1718 | 796 | 542 | 916 | 1519 | 945 | 1313 | 1367 | 1364 | 1314 |
| | 1324 | 1352 | 1355 | 1293 | 1294 | 1378 | 1401 | 1399 | 1310 | 2068 | 2082 | 1597 |
| | 1160 | 1773 | 1586 | 1599 | 1976 | 1582 | 1580 | 1817 | 673 | | | |
| 156: | 586 | 1434 | 2042 | 280 | 1523 | 2079 | 1647 | 705 | 817 | 1820 | 1915 | 617 |
| | 1830 | 1135 | 2125 | 2149 | 1858 | 492 | 1757 | 819 | 918 | 818 | 759 | 692 |
| 157: | 1517 | 1030 | 1583 | 359 | 655 | 1705 | 740 | 439 | 2020 | 1973 | 908 | 1090 |
| | 1796 | 1696 | 962 | 318 | 2084 | 2017 | 1057 | 1117 | 422 | 378 | 684 | 554 |
| | 1501 | 474 | 679 | 1910 | 864 | 880 | 624 | 1584 | 1307 | 234 | 1204 | 306 |
| | 546 | 1674 | 1782 | 1245 | 396 | 1189 | 1211 | 678 | 367 | 1779 | 1821 | 1437 |
| | 870 | 1878 | 2043 | 2058 | 1686 | 445 | 1381 | 1678 | 558 | 465 | 1550 | 1618 |
| | 892 | 1680 | | | | | | | | | | |
| 158: | 1570 | 294 | 1640 | 2053 | 1248 | 1252 | 1703 | 547 | 1201 | 1362 | 1386 | 2132 |
| | 712 | 1327 | 453 | 363 | 212 | 1841 | 379 | 2060 | 446 | 998 | 1340 | 961 |
| | 627 | 910 | 805 | 1928 | 1899 | 1469 | 1052 | 2108 | 1716 | 237 | 1972 | 1038 |
| | 949 | 1289 | 1808 | 1824 | 2010 | 695 | 560 | 1029 | 1946 | 1089 | 657 | 1088 |
| | 1730 | 328 | | | | | | | | | | |
| 159: | 781 | 1325 | 2061 | 1348 | 1350 | 1346 | 1332 | 196 | 903 | 915 | 1759 | 1882 |
| | 1639 | 2006 | 667 | 2035 | 652 | 1566 | 1169 | 830 | 1220 | 2051 | 920 | 470 |
| | 1105 | 1103 | 1290 | 1288 | 1375 | 1370 | 1296 | 1395 | 1328 | 1330 | 1311 | 509 |
| | 579 | 1488 | 628 | 292 | 1875 | 952 | 1504 | 1803 | 779 | 1430 | 285 | 1857 |
| | 1598 | 1718 | 796 | 1101 | 1739 | 423 | 542 | 916 | 1519 | 945 | 1313 | 1364 |
| | 1367 | 1324 | 1314 | 1352 | 1355 | 1293 | 1294 | 1378 | 1401 | 1399 | 1310 | 2082 |
| | 2068 | 1597 | 1160 | 1773 | 1599 | 1586 | 1582 | 1976 | 1580 | 1722 | 1545 | |
| 160: | 1570 | 294 | 1640 | 2053 | 1248 | 1252 | 1703 | 547 | 1201 | 1362 | 1386 | 2132 |
| | 712 | 1327 | 453 | 363 | 1559 | 2091 | 1735 | 1596 | 1402 | 385 | 1842 | 1695 |
| | 703 | 1484 | 1373 | 961 | 1658 | 563 | 2104 | 702 | 1736 | 1662 | 1899 | 1469 |
| | 1052 | 1767 | 699 | 1801 | 237 | 1716 | 240 | 242 | 1972 | 1038 | 528 | 2021 |
| | 1249 | 300 | 1824 | 2010 | 695 | 560 | 1029 | 1946 | 1089 | 657 | 1088 | 1854 |
| | 164 | 162 | 161 | 165 | 420 | 1113 | 1738 | 685 | 1843 | 1415 | | |
| 161: | 1570 | 294 | 1640 | 2053 | 1248 | 1252 | 1703 | 547 | 1201 | 1362 | 1386 | 2132 |
| | 712 | 1327 | 453 | 363 | 1559 | 2091 | 1735 | 1596 | 1402 | 385 | 1842 | 1695 |
| | 703 | 1484 | 1373 | 961 | 1658 | 563 | 2104 | 702 | 1736 | 1662 | 1899 | 1469 |
| | 1052 | 1767 | 699 | 1801 | 237 | 1716 | 240 | 242 | 1972 | 1038 | 528 | 2021 |
| | 1249 | 300 | 1824 | 2010 | 695 | 560 | 1029 | 1946 | 1089 | 657 | 1088 | 165 |
| | 164 | 162 | 1854 | 160 | 420 | 1113 | 1738 | 685 | 1843 | 1415 | | |
| 162: | 1570 | 294 | 1640 | 2053 | 1248 | 1252 | 1703 | 547 | 1201 | 1362 | 1386 | 2132 |
| | 712 | 1327 | 453 | 363 | 1559 | 2091 | 1735 | 1596 | 1402 | 385 | 1842 | 1695 |
| | 703 | 1484 | 1373 | 961 | 1658 | 563 | 2104 | 702 | 1736 | 1662 | 1899 | 1469 |
| | 1052 | 1767 | 699 | 1801 | 237 | 1716 | 240 | 242 | 1972 | 1038 | 528 | 2021 |
| | 1249 | 300 | 1824 | 2010 | 695 | 560 | 1029 | 1946 | 1089 | 657 | 1088 | 165 |
| | 164 | 161 | 1854 | 160 | 420 | 1113 | 1738 | 685 | 1843 | 1415 | | |
| 163: | 1605 | | | | | | | | | | | |
| 164: | 1570 | 294 | 1640 | 2053 | 1248 | 1252 | 1703 | 547 | 1201 | 1362 | 1386 | 2132 |
| | 712 | 1327 | 453 | 363 | 1559 | 2091 | 1735 | 1596 | 1402 | 385 | 1842 | 1695 |
| | 703 | 1484 | 1373 | 961 | 1658 | 563 | 2104 | 702 | 1736 | 1662 | 1899 | 1469 |
| | 1052 | 1767 | 699 | 1801 | 237 | 1716 | 240 | 242 | 1972 | 1038 | 528 | 2021 |
| | 1249 | 300 | 1824 | 2010 | 695 | 560 | 1029 | 1946 | 1089 | 657 | 1088 | 162 |
| | 165 | 161 | 1854 | 160 | 420 | 1113 | 1738 | 685 | 1843 | 1415 | | |
| 165: | 1570 | 294 | 1640 | 2053 | 1248 | 1252 | 1703 | 547 | 1201 | 1362 | 1386 | 2132 |
| | 712 | 1327 | 453 | 363 | 1559 | 2091 | 1735 | 1596 | 1402 | 385 | 1842 | 1695 |
| | 703 | 1484 | 1373 | 961 | 1658 | 563 | 2104 | 702 | 1736 | 1662 | 1899 | 1469 |
| | 1052 | 1767 | 699 | 1801 | 237 | 1716 | 240 | 242 | 1972 | 1038 | 528 | 2021 |
| | 1249 | 300 | 1824 | 2010 | 695 | 560 | 1029 | 1946 | 1089 | 657 | 1088 | 161 |
| | 162 | 164 | 1854 | 160 | 420 | 1113 | 1738 | 685 | 1843 | 1415 | | |
| 166: | 1144 | 708 | 202 | 364 | 1321 | 219 | 216 | 1541 | 356 | 603 | 488 | 587 |
| | 581 | 2126 | 394 | 438 | 1272 | 1666 | 225 | 651 | 1604 | 1602 | 989 | 1060 |
| | 1594 | 243 | 1082 | 1054 | 1970 | 1865 | | | | | | |
| 167: | 1177 | 1754 | 521 | 1254 | 2067 | 471 | 2012 | 1673 | 834 | 1280 | 1464 | 400 |
| | 807 | 622 | 1027 | 1939 | 1556 | 426 | 565 | 1360 | 1452 | 493 | 1569 | 1200 |
| | 1892 | 321 | 2071 | 427 | 1831 | 1557 | 1701 | 1890 | 1889 | 785 | 1334 | 1149 |
| | 1255 | 1438 | 1554 | 1838 | | | | | | | | |
| 168: | 1475 | 1302 | 388 | 2165 | 2070 | 2073 | 2065 | 865 | 1077 | 484 | 589 | 487 |
| | 604 | 1067 | 1068 | 760 | 994 | 585 | 495 | 890 | 1885 | 876 | 1285 | 2033 |
| | 222 | 1762 | 1015 | 801 | 839 | 842 | 1871 | 844 | 435 | 857 | 859 | 650 |
| | 1237 | 1238 | 861 | 1111 | 2111 | 432 | 694 | 1929 | 314 | 1170 | 1942 | 1908 |
| | 1560 | 1216 | 1964 | 537 | 311 | 825 | 841 | 1530 | 1002 | 1909 | 443 | 1682 |
| | 664 | 572 | 2083 | 1070 | 1153 | | | | | | | |
| 169: | 1320 | 2158 | 541 | 295 | 1150 | 984 | 284 | 743 | 1714 | 1728 | 2008 | 1136 |
| | 1823 | 847 | 1508 | 2115 | 2130 | 1121 | 1977 | 1802 | 481 | 1466 | 1244 | 1140 |
| | 717 | 1996 | 1979 | 461 | | | | | | | | |
| 170: | 806 | 1210 | 871 | 1412 | 248 | 265 | 264 | 246 | 2075 | 286 | 312 | 238 |
| | 1243 | 744 | 428 | 629 | 1131 | 2148 | 1110 | 1426 | 497 | 933 | 1814 | 1927 |
| | 1924 | 641 | 1918 | 1578 | 926 | 958 | 1847 | 1197 | 2096 | 939 | 1368 | 1630 |
| | 1441 | 886 | 490 | 1731 | 1729 | 782 | 557 | 1227 | 1419 | 1179 | 2045 | 1792 |
| | 1774 | 1186 | 1219 | 1423 | 977 | 1607 | 1791 | 1763 | 1761 | 1789 | 1777 | 682 |
| | 644 | 268 | 226 | 623 | 829 | 1793 | 1836 | 1265 | 1790 | 263 | 258 | 260 |
| | 731 | 566 | 1376 | 1720 | 447 | 1579 | 850 | 1953 | 676 | 849 | 1308 | 1869 |
| | 2092 | 567 | 967 | 2009 | 499 | 936 | 1931 | 403 | 382 | 609 | 680 | 733 |
| | 982 | 1725 | 1713 | 1711 | 1710 | 1693 | 1214 | | | | | |
| 171: | 416 | 1799 | 662 | 298 | 1278 | 1126 | 1694 | 1176 | 1187 | 1819 | 2119 | 1397 |
| | 468 | 1664 | 1493 | 932 | 1393 | 1498 | 2088 | 1811 | 1259 | 1184 | 369 | 1008 |
| | 1009 | 1966 | 395 | 1036 | 1037 | 1039 | 1033 | 1995 | 1992 | 1040 | 1071 | 1065 |
| | 1155 | 1141 | 352 | 354 | 1926 | 1826 | 1661 | 1053 | 301 | 1642 | 233 | 1627 |
| | 2048 | 1593 | 1613 | 1483 | 1667 | 1010 | 437 | 1125 | 1080 | 1092 | 529 | 331 |
| | 347 | 1982 | 1165 | 1568 | 1542 | 1451 | | | | | | |
| 172: | 894 | 956 | 2013 | 430 | 1041 | 1448 | 713 | 1021 | 591 | 325 | 786 | 928 |
| | 1034 | 1522 | 1506 | 1743 | 1905 | 522 | | | | | | |
| 173: | 203 | 711 | 1833 | 1765 | 1956 | 1295 | 410 | 1050 | 822 | 1496 | 1781 | 762 |
| | 1095 | 981 | 1006 | 1097 | 1827 | 1611 | 1632 | 559 | 527 | 1512 | 445 | 1473 |
| 174: | 2086 | 2089 | 2087 | 1061 | 1588 | 1980 | 757 | 1601 | 1581 | 2120 | 2107 | 1679 |
| | 1818 | 1998 | 1997 | 1959 | 1309 | 1270 | 2056 | 2001 | 2002 | 2003 | 2018 | 1978 |
| | 761 | 700 | 1271 | 2041 | 1975 | 283 | 291 | 2026 | 1206 | 1363 | 1495 | 1565 |
| | 1048 | 1537 | 1016 | 2011 | 1989 | 1652 | 561 | 929 | 753 | 1531 | 1515 | 754 |
| | 631 | 912 | 1687 | 1264 | 200 | 1952 | 2123 | 2135 | 656 | 960 | 381 | 966 |
| | 2063 | 937 | 545 | 1222 | 1072 | 1392 | 590 | 2150 | 1856 | 1262 | 959 | 925 |
| | 1589 | 940 | 1591 | 1614 | 811 | 343 | 1797 | 1205 | 571 | 1832 | 877 | 1510 |
| | 1011 | 944 | 846 | 938 | 948 | 649 | 726 | 897 | 1292 | 1047 | 1944 | 1962 |
| | 964 | 965 | 1592 | 968 | 1509 | 277 | 1893 | 909 | 1435 | 1648 | 1866 | 1357 |
| | 1377 | 643 | 2074 | 2072 | 1623 | 1527 | 1957 | 1342 | 1344 | 763 | 1319 | 472 |
| | 632 | 647 | 633 | 856 | 1353 | 1158 | 1410 | 1046 | 195 | 2166 | 2069 | 2064 |
| | 907 | 2139 | 1677 | 2159 | 2160 | 2136 | 214 | 232 | 224 | 1845 | 2022 | 2023 |
| | 1485 | 1487 | 383 | 440 | 1913 | 675 | 1600 | 946 | 274 | 1192 | 1229 | 175 |
| | 323 | 1335 | | | | | | | | | | |
| 175: | 2086 | 2089 | 1061 | 1588 | 1349 | 1351 | 1921 | 235 | 1980 | 757 | 1601 | 1581 |
| | 2120 | 2107 | 1535 | 1538 | 1679 | 1818 | 1998 | 1997 | 1959 | 1309 | 1270 | 2056 |
| | 1168 | 2001 | 2002 | 2003 | 2018 | 1978 | 700 | 1271 | 2041 | 1975 | 283 | 291 |
| | 2026 | 2024 | 1206 | 1363 | 1495 | 1565 | 1048 | 1537 | 1016 | 2011 | 1989 | 1652 |
| | 561 | 929 | 753 | 1634 | 1531 | 1515 | 754 | 1383 | 631 | 912 | 1687 | 1264 |
| | 200 | 1952 | 2123 | 656 | 960 | 381 | 966 | 2063 | 1222 | 1072 | 1392 | 590 |
| | 2150 | 1856 | 1262 | 959 | 925 | 1589 | 940 | 1591 | 1614 | 811 | 343 | 1797 |
| | 1205 | 571 | 1832 | 877 | 1510 | 1011 | 944 | 846 | 938 | 948 | 649 | 726 |
| | 897 | 1292 | 1047 | 1944 | 1962 | 964 | 1741 | 1592 | 965 | 968 | 1509 | 1590 |
| | 1341 | 277 | 1893 | 909 | 1435 | 1648 | 1866 | 1377 | 1357 | 643 | 2074 | 2072 |
| | 1623 | 1527 | 1957 | 1342 | 1344 | 763 | 1319 | 472 | 632 | 647 | 856 | 1353 |
| | 1158 | 1046 | 2069 | 2064 | 907 | 2139 | 1677 | 2159 | 2160 | 214 | 224 | 232 |
| | 1845 | 750 | 721 | 2022 | 2023 | 1485 | 1487 | 383 | 440 | 1913 | 441 | 1600 |
| | 946 | 1335 | 1229 | 174 | 1192 | 274 | | | | | | |
| 176: | 2086 | 1911 | 1456 | 1447 | 1449 | 751 | 1581 | 2120 | 1780 | 1431 | 208 | 1998 |
| | 1997 | 1959 | 1306 | 2056 | 1168 | 2001 | 2003 | 2018 | 1978 | 700 | 1465 | 1444 |
| | 1461 | 1429 | 1428 | 1967 | 1912 | 1271 | 2041 | 1215 | 1439 | 1457 | 1442 | 1016 |
| | 1634 | 1585 | 596 | 631 | 215 | 217 | 200 | 1952 | 2123 | 656 | 950 | 960 |
| | 207 | 209 | 381 | 2027 | 1671 | 749 | 1258 | 2063 | 1222 | 1195 | 1551 | 1902 |
| | 462 | 194 | 1392 | 450 | 1424 | 1407 | 1408 | 1558 | 1109 | 959 | 925 | 1591 |
| | 940 | 1385 | 1382 | 1614 | 494 | 2116 | 1815 | 877 | 1510 | 944 | 1460 | 771 |
| | 783 | 770 | 1274 | 938 | 1387 | 1275 | 1988 | 580 | 1626 | 2153 | 964 | 1592 |
| | 965 | 968 | 1787 | 418 | 1719 | 1230 | 460 | 1619 | 1232 | 1305 | 297 | 1494 |
| | 2059 | 1377 | 1333 | 1948 | 517 | 643 | 691 | 2074 | 1844 | 1410 | 2166 | 1643 |
| | 907 | 2139 | 954 | 2022 | 2023 | 1490 | 1406 | 1427 | 946 | 2137 | | |
| 177: | 303 | 408 | 860 | 2124 | 373 | 1812 | 795 | 729 | 814 | 2015 | | |
| 178: | 781 | 1325 | 2061 | 1350 | 1348 | 1346 | 467 | 903 | 915 | 1759 | 1882 | 1685 |
| | 1688 | 808 | 2117 | 2094 | 544 | 1547 | 1770 | 1566 | 1174 | 920 | 1984 | 2036 |
| | 470 | 319 | 1288 | 1290 | 1375 | 1395 | 1296 | 1330 | 1328 | 1311 | 342 | 1758 |
| | 1723 | 292 | 1532 | 2044 | 990 | 1112 | 764 | 668 | 1063 | 1123 | 1969 | 542 |
| | 916 | 945 | 1367 | 1364 | 1313 | 1314 | 1324 | 1355 | 1352 | 1293 | 1294 | 1378 |
| | 1401 | 1399 | 1310 | 2082 | 2068 | 1597 | 1160 | 1773 | 1529 | 2025 | | |
| 179: | 303 | 408 | 860 | 2124 | 373 | 1812 | 795 | 729 | 814 | 2015 | | |
| 180: | 1754 | 508 | 469 | 1907 | 1965 | 595 | 1464 | 1458 | 400 | 514 | 1617 | 1810 |
| | 1839 | 565 | 348 | 366 | 389 | 391 | 431 | 1825 | 1004 | | | |
| 181: | 1919 | 972 | 351 | 349 | 1188 | 2164 | 1749 | 305 | 287 | 1329 | 983 | 935 |
| | 1876 | 780 | 1747 | 1883 | 1175 | 1454 | 1326 | 2161 | 1042 | 1920 | 1654 | 843 |
| | 1717 | 2014 | 900 | 824 | 820 | 530 | 1653 | | | | | |
| 182: | 1225 | 666 | 2099 | 1453 | 1467 | 774 | 1337 | 1137 | 562 | 2080 | 1235 | 1574 |
| | 1963 | 1518 | 598 | 670 | 1462 | 719 | 442 | 523 | 1443 | 947 | 2000 | 1445 |
| | 2054 | 1675 | 931 | 706 | 584 | 1240 | 718 | 838 | 1764 | 2114 | 2109 | 1480 |
| | 1772 | 1022 | 1171 | 332 | | | | | | | | |
| 183: | 1528 | 1786 | 1660 | 387 | 502 | 1562 | 204 | 1007 | 992 | 1880 | 1073 | 788 |
| | 686 | 1388 | 1267 | 1840 | 2019 | 2050 | 1938 | 1943 | 1546 | 872 | 1024 | 485 |
| | 1934 | 1622 | 1629 | 1541 | 340 | 674 | 1477 | 742 | 511 | 922 | 231 | 1960 |
| | 2062 | 1440 | 1689 | 1051 | 2122 | 1755 | 583 | 2156 | 2162 | 188 | 2127 | 1481 |
| | 1563 | 1897 | 672 | 394 | 225 | 784 | 1526 | 448 | 1795 | 302 | 1862 | 2028 1983 |
| | 646 | 304 | 310 | 739 | 1459 | | | | | | | |
| 184: | 1754 | 508 | 469 | 1907 | 1965 | 595 | 1464 | 1458 | 400 | 514 | 1617 | 1810 |
| | 1839 | 565 | 348 | 366 | 389 | 391 | 431 | 1825 | 1004 | | | |
| 185: | 2016 | 213 | 1056 | 254 | 799 | 1217 | 600 | 848 | 334 | 1134 | 444 | 1343 |
| | 1124 | 1923 | 904 | 812 | 953 | 985 | 1587 | 1000 | 999 | 716 | 1877 | 828 |
| | 372 | 1162 | 854 | 934 | 599 | 884 | 1887 | 115 | 621 | 251 | 1091 | 1768 |
| | 116 | 2155 | | | | | | | | | | |
| 186: | 1144 | 1143 | 1813 | 386 | 995 | 502 | 1668 | 1007 | 1279 | 271 | 1651 | 1024 |
| | 1541 | 356 | 1540 | 660 | 1689 | 1051 | 488 | 2121 | 555 | 683 | 1987 | 581 |
| | 132 | 131 | 130 | 129 | 128 | 973 | 672 | 438 | 1272 | 1666 | 1384 | 1520 |
| | 698 | 1173 | 1513 | 336 | 1269 | 756 | 943 | 1949 | 776 | 243 | 1241 | 1970 |
| | 646 | 304 | 402 | | | | | | | | | |
| 187: | 269 | 1470 | 1317 | 255 | 976 | 320 | 957 | 1849 | 1365 | 1760 | 577 | 1968 |
| | 1161 | 576 | 777 | 308 | | | | | | | | |
| 188: | 502 | 1562 | 1007 | 992 | 1073 | 1880 | 788 | 686 | 1840 | 2019 | 1938 | 1267 |
| | 1388 | 2050 | 1943 | 1546 | 872 | 663 | 1024 | 485 | 1629 | 1622 | 674 | 1477 |
| | 340 | 511 | 742 | 922 | 231 | 1130 | 1202 | 1226 | 1440 | 1689 | 1051 | 2122 |
| | 1755 | 583 | 1266 | 1563 | 672 | 1868 | 784 | 346 | 802 | 309 | 2076 | 358 |
| | 1146 | 475 | 1575 | 199 | 536 | 1420 | 1421 | 1394 | 310 | 739 | 183 | 1062 |
| | 1459 | 2133 | 2157 | 409 | 625 | 689 | 646 | 304 | 2162 | | | |
| 189: | 1163 | 896 | 1164 | 1850 | 337 | 341 | 1032 | 874 | 1182 | 230 | 307 | 540 |
| | 626 | 1374 | 1045 | 728 | 746 | 2113 | 2124 | 533 | 951 | 980 | 1043 | 1784 |
| | 845 | 1650 | 1925 | 498 | 515 | 1404 | 1930 | 642 | | | | |
| 190: | 1919 | 972 | 351 | 349 | 1188 | 2164 | 1749 | 305 | 287 | 1329 | 983 | 935 |
| | 1876 | 780 | 1747 | 1883 | 1175 | 1454 | 1326 | 2161 | 1042 | 1920 | 1654 | 843 |
| | 1717 | 2014 | 900 | 824 | 820 | 530 | 1653 | | | | | |

### EXAMPLE 7

### Selection of Transgenic Plants with Enhanced Agronomic Trait(s)

[0080] This example illustrates identification of transgenic plant cells of the invention by screening derived plants and seeds for enhanced trait. Transgenic seed and plants in corn, soybean, cotton or canola with recombinant DNA constructs identified in Table 1 are prepared by plant cells transformed with DNA that is stably integrated into a chromosome of the plant cell. Progeny transgenic plants and seed of the transformed plant cells are screened for enhanced water use efficiency, enhanced cold tolerance, increased yield, enhanced nitrogen use efficiency, enhanced seed protein and enhanced seed oil as compared to control plants

### A. Selection for Enhanced Nitrogen Use Efficiency (NUE)

[0081] Transgenic corn seeds provided by the present invention are planted in fields with three levels of nitrogen (N) fertilizer being applied, i.e. low level (0 N), medium level (80 lb/ac) and high level (180 lb/ac). A variety of physiological traits are monitored. Plants with enhanced NUE provide higher yield as compared to control plants.

### B. Selection for Increased Yield

[0082] Effective selection of enhanced yielding transgenic plants uses hybrid progeny of the transgenic plants for corn, cotton, and canola, or inbred progeny of transgenic plants for soybean, canola and cotton over multiple locations with plants grown under optimal production management practices, and maximum pest control. A useful target for improved yield is a 5% to 10% increase as compared to yield produced by plants grown from seed for a control plant. Selection methods may be applied in multiple and diverse geographic locations, for example up to 16 or more locations, over one or more planting seasons, for example at least two planting seasons, to statistically distinguish yield improvement from natural environmental effects.

### C. Selection for Enhanced Water Use Efficiency (WUE)

[0083] The selection process imposes a water withholding period to induce drought stress followed by watering. For example, for corn, a useful selection process imposes 3 drought/re-water cycles on plants over a total period of 15 days after an initial stress free growth period of 11 days. Each cycle consists of 5 days, with no water being applied for the first four days and a water quenching on the 5th day of the cycle. The primary phenotypes analyzed by the selection method are the changes in plant growth rate as determined by height and biomass during a vegetative drought treatment.

### D. Selection for Growth Under Cold Stress

[0084] (1) Cold germination assay—Trays of transgenic and control seeds are placed in a growth chamber at 9.7° C. for 24 days (no light). Seeds having higher germination rates as compared to the control are identified.

[0085] (2) Cold field efficacy trial—A cold field efficacy trial is used to identify recombinant DNA constructs that confer enhanced cold vigor at germination and early seedling growth under early spring planting field conditions in conventional-till and simulated no-till environments. Seeds are planted into the ground around two weeks before local farmers begin to plant corn so that a significant cold stress is exerted onto the crop, named as cold treatment. Seeds also are planted under local optimal planting conditions such that the crop has little or no exposure to cold condition, named as normal treatment. At each location, seeds are planted under both cold and normal conditions with 3 repetitions per treatment. Two temperature monitors are set up at each location to monitor both air and soil temperature daily.

[0086] Seed emergence is defined as the point when the growing shoot breaks the soil surface. The number of emerged seedlings in each plot is counted everyday from the day the earliest plot begins to emerge until no significant changes in emergence occur. In addition, for each planting date, the latest date when emergence is 0 in all plots is also recorded. Seedling vigor is also rated at V3-V4 stage before the average of corn plant height reaches 10 inches, with 1=excellent early growth, 5=Average growth and 9=poor growth. Days to 50% emergence, maximum percent emergence and seedling vigor are used to determine plants with enhanced cold tolerance.

E. Screens for Transgenic Plant Seeds with Increased Protein and/or Oil Levels

[0087] This example sets forth a high-throughput selection for identifying plant seeds with improvement in seed composition using, the Infratec 1200 series Grain Analyzer, which is a near-infrared transmittance spectrometer used to determine the composition of a bulk seed sample (Table 9). Near infrared analysis is a non-destructive, high-throughput method that can analyze multiple traits in a single sample scan. An NIR calibration for the analytes of interest is used to predict the values of an unknown sample. The NIR spectrum is obtained for the sample and compared to the calibration using a complex chemometric software package that provides predicted values as well as information on how well the sample fits in the calibration.

[0088] Infratec Model 1221, 1225, or 1227 with transport module by Foss North America is used with cuvette, item # 1000-4033, Foss North America or for small samples with small cell cuvette, Foss standard cuvette modified by Leon Girard Co. Corn and soy check samples of varying composition maintained in check cell cuvettes are supplied by Leon Girard Co. NIT collection software is provided by Maximum Consulting Inc. Software. Calculations are performed automatically by the software. Seed samples are received in packets or containers with barcode labels from the customer. The seed is poured into the cuvettes and analyzed as received.

TABLE 9

| | |
|---|---|
| Typical sample(s): | Whole grain corn and soybean seeds |
| Analytical time to run method: | Less than 0.75 min per sample |
| Total elapsed time per run: | 1.5 minute per sample |
| Typical and minimum sample | Corn typical: 50 cc; minimum 30 cc |
| size: | Soybean typical: 50 cc; minimum 5 cc |
| Typical analytical range: | Determined in part by the specific |
| | calibration. |
| | Corn - moisture 5-15%, oil 5-20%, |
| | protein 5-30%, starch 50-75%, and |
| | density 1.0-1.3%. |
| | Soybean - moisture 5-15%, oil |
| | 15-25%, and protein 35-50%. |

### EXAMPLE 8

### Consensus Sequence

[0089] This example illustrates the identification of consensus amino acid sequence for the proteins and homologs encoded by DNA that is used to prepare the transgenic seed and plants of this invention having enhanced agronomic traits.

[0090] ClustalW program was selected for multiple sequence alignments of the amino acid sequence of SEQ ID NO: 127 and its 10 homologs. Three major factors affecting the sequence alignments dramatically are (1) protein weight matrices; (2) gap open penalty; (3) gap extension penalty. Protein weight matrices available for ClustalW program include Blosum, Pam and Gonnet series. Those parameters with gap open penalty and gap extension penalty were extensively tested. On the basis of the test results, Blosum weight matrix, gap open penalty of 10 and gap extension penalty of 1 were chosen for multiple sequence alignment. FIG. 1 shows the sequences of SEQ ID NO: 127, its homologs and the consensus sequence (SEQ ID NO: 2201) at the end. The symbols for consensus sequence are (1) uppercase letters for 100% identity in all positions of multiple sequence alignment output; (2) lowercase letters for >=70% identity; symbol; (3) “X” indicated <70% identity; (4) dashes “-” meaning that gaps were in >=70% sequences.

[0091] The consensus amino acid sequence can be used to identify DNA corresponding to the full scope of this invention that is useful in providing transgenic plants, for example corn and soybean plants with enhanced agronomic traits, for example improved nitrogen use efficiency, improved yield, improved water use efficiency and/or improved growth under cold stress, due to the expression in the plants of DNA encoding a protein with amino acid sequence identical to the consensus amino acid sequence.

### EXAMPLE 9

### Identification of Amino Acid Domain by Pfam Analysis

[0092] This example illustrates the identification of protein domain and domain module by Pfam analysis. The amino acid sequence of the expressed proteins that are shown to be associated with an enhanced trait were analyzed for Pfam protein family a against the current Pfam collection of multiple sequence alignments and Hidden Markov models using the HMMER software in the appended computer listing. The Pfam protein domains and modules for the proteins for the proteins of SEQ ID NO: 96 through 193 are shown in Tables 11 and 10 respectively. The Hidden Markov model databases for the identified pfam domains are also in the appended computer listing allowing identification of other homologous proteins and their cognate encoding DNA to enable the full breadth of the invention for a person of ordinary skill in the art. Certain proteins are identified by a single Pfam domain and others by multiple Pfam domains. For instance, the protein with amino acids of SEQ ID NO: 98 is characterized by the Pfam domains, i.e. KNOX1, KNOX2 and ELK.

TABLE 10

Pfam domain module annotation

| PEP | | | |
|---|---|---|---|
| SEQ ID | | | |
| NO | Gene ID | Pfam domain module | Position |
| 154 | PHE0001067_8154.pep | Homeobox | 97-158 |
| 106 | PHE0002062_5913.pep | Myb_DNA- | 14-61::67-112 |
| | | binding::Myb_DNA-binding | |
| 140 | PHE0002149_7487.pep | Myb_DNA-binding | 24-69 |
| 171 | PHE0002149_8748.pep | Myb_DNA-binding | 24-69 |
| 107 | PHE0002531_5926.pep | zf-Dof | 39-101 |
| 152 | PHE0002531_7985.pep | zf-Dof | 39-101 |
| 151 | PHE0003473_7927.pep | zf-C2H2::zf-C2H2 | 72-94::149-171 |
| 138 | PHE0003664_7436.pep | AP2 | 21-84 |
| 166 | PHE0003664_8637.pep | AP2 | 21-84 |
| 137 | PHE0003673_7430.pep | Response_reg::Myb_DNA- | 13-126::197-247 |
| | | binding | |
| 188 | PHE0004332_PMON95104.pep | AP2 | 104-168 |
| 187 | PHE0004356_PMON93862.pep | B3 | 23-128 |
| 183 | PHE0004357_PMON94163.pep | AP2 | 135-199 |
| 153 | PHE0004463_8059.pep | AP2 | 6-69 |
| 186 | PHE0004463_PMON94432.pep | AP2 | 6-69 |
| 185 | PHE0004624_PMON94400.pep | B3::Auxin_resp::AUX_1AA | 141-246::268- |
| | | | 350::640-805 |
| 96 | PHE0004633_5508.pep | HLH | 104-152 |
| 189 | PHE0004644_PMON95096.pep | HLH | 327-374 |
| 184 | PHE0004646_PMON94352.pep | NAM | 17-139 |
| 180 | PHE0004646_PMON94356.pep | NAM | 17-139 |
| 182 | PHE0004648_PMON95051.pep | B3::B3 | 13-105::148-244 |
| 181 | PHE0004723_PMON94660.pep | AUX_IAA | 6 |
| 190 | PHE0004723_PMON95121.pep | AUX_IAA | 6 |
| 97 | PHE0004738_5674.pep | NAM | 96 |
| 98 | PHE0004814_5801.pep | KNOX1::KNOX2::ELK | 38-82::92- |
| | | | 147::203-244 |
| 133 | PHE0004816_7303.pep | HLH | 19-68 |
| 136 | PHE0004816_7418.pep | HLH | 19-68 |
| 135 | PHE0004816_7421.pep | HLH | 19-68 |
| 139 | PHE0004816_7445.pep | HLH | 19-68 |
| 99 | PHE0004817_5809.pep | HLH | 20-69 |
| 100 | PHE0004817_5810.pep | HLH | 20-69 |
| 103 | PHE0004817_5901.pep | HLH | 20-69 |
| 101 | PHE0004821_5819.pep | HLH | 105-154 |
| 102 | PHE0004828_5826.pep | HLH | 107-156 |
| 104 | PHE0004861_5910.pep | GRAS | 26-325 |
| 105 | PHE0004863_5912.pep | AT_hook::AT_HOOK::DUF296 | 121-133 |
| 119 | PHE0004877_7030.pep | Response_reg::Myb_DNA- | 13-126::197-247 |
| | | binding | |
| 108 | PHE0004914_5971.pep | Myb_DNA- | 11-60::117-164 |
| | | binding::Myb_DNA-binding | |
| 109 | PHE0004924_5982.pep | TCP | 38-253 |
| 110 | PHE0004925_5983.pep | SBP | 58-136 |
| 111 | PHE0004938_5994.pep | GRAS | 154-454 |
| 159 | PHE0004938_8370.pep | GRAS | 154-454 |
| 112 | PHE0004957_6019.pep | zf-C2H2 | 68-90 |
| 113 | PHE0004958_6020.pep | zf-Dof | 104-166 |
| 114 | PHE0004959_6021.pep | AP2 | 128-191 |
| 115 | PHE0004974_6040.pep | B3::Auxin_resp | 148-253 |
| 116 | PHE0004975_6041 pep | B3::Auxin_resp | 136-241::263-345 |
| 117 | PHE0004987_6056.pep | Myb_DNA-binding | 21-72 |
| 173 | PHE0004987_8771.pep | Myb_DNA-binding | 21-72 |
| 118 | PHE0005005_7034.pep | Myb_DNA-binding | 96-143 |
| 124 | PHE0006004_7082.pep | NAM | 18-147 |
| 167 | PHE0006004_8667.pep | NAM | 18-147 |
| 125 | PHE0006022_7105.pep | EIN3 | 30-426 |
| 168 | PHE0006022_8690.pep | EIN3 | 30-426 |
| 126 | PHE0006023_7240.pep | HLH | 160-210 |
| 172 | PHE0006023_8762.pep | HLH | 160-210 |
| 120 | PHE0006057_7048.pep | HLH | 12-61 |
| 121 | PHE0006057_7053.pep | HLH | 12-61 |
| 150 | PHE0006057_7929.pep | HLH | 12-61 |
| 122 | PHE0006070_7067.pep | bZIP_2 | 96-153 |
| 123 | PHE0006073_7072.pep | bZIP_2 | 96-153 |
| 128 | PHE0006237_7261.pep | AP2 | 6-69 |
| 130 | PHE0006237_7268.pep | AP2 | 6-69 |
| 129 | PHE0006237_7274.pep | AP2 | 6-69 |
| 131 | PHE0006237_7277.pep | AP2 | 6-69 |
| 132 | PHE0006237_7284.pep | AP2 | 6-69 |
| 141 | PHE0006290_7498.pep | zf-B_box::zf-B_box | 1-47::48-90 |
| 169 | PHE0006290_8689.pep | zf-B_box::zf-B_box | 1-47::48-90::355- |
| | | | 393 |
| 134 | PHE0006291_7319.pep | zf-B_box::CCT | 3-50::309-347 |
| 155 | PHE0006350_8201.pep | GRAS | 98-403 |
| 143 | PHE0006384_7737.pep | Myb DNA- | 14-61::67-112 |
| | | binding::MYb_DNA-binding | |
| 144 | PHE0006384_7789.pep | Myb_DNA- | 14-61::67-112 |
| | | binding::Myb_DNA-binding | |
| 147 | PHE0006384_7839.pep | Myb_DNA- | 14-61::67-112 |
| | | binding::Myb_DNA-binding | |
| 142 | PHE0006423_7664.pep | Myb_DNA- | 14-61::67-112 |
| | | binding::Myb_DNA-binding | |
| 170 | PHE0006423_8696.pep | Myb_DNA- | 14-61:67-112 |
| | | binding::Myb_DNA-binding | |
| 148 | PHE0006448_7859.pep | RWP-RK::PB1 | 553-604::741-823 |
| 149 | PHE0006504_7876.pep | F-box::TUB | 49-104::115-424 |
| 145 | PHE0006507_7828.pep | CBFD_NFYB_HMF | 1-40 |
| 146 | PHE0006509_7846.pep | SBP | 64-142 |
| 158 | PHE0006527_8369.pep | CBFD_NFYB_HMF\E | 26-91 |
| 157 | PHE0006546_8310.pep | Response_reg::Myb_DNA- | 28-141::225-275 |
| | | binding | |
| 156 | PHE0006605_8233.pep | GATA | 223-258 |
| 163 | PHE0006752_8521.pep | SRF-TF | 9-59 |
| 163 | PHE0006752_8521.pep | K-box | 75-174 |
| 160 | PHE0006774_8489.pep | CBFD_NFYB_HMF | 34-106 |
| 161 | PHE0006778_8503.pep | CBFD_NFYB_HMF | 34-106 |
| 164 | PHE0006779_8565.pep | CBFD_NFYB_HMF | 34-106 |
| 162 | PHE0006780_8502.pep | CBFD_NFYB_HMF | 34-106 |
| 165 | PHE0006781_8573.pep | CBFD_NFYB_HMF | 34-106 |
| 174 | PHE0006858_8859.pep | SRF-TF::K-box | 9-59::75-174 |
| 175 | PHE0006860_8863.pep | SRF-TF::K-box | 9-59::75-174 |
| 177 | PHE0006951_9137.pep | zf-C2H2 | 152-175 |
| 179 | PHE0006951_9173.pep | zf-C2H2 | 152-175 |
| 176 | PHE0006955_9129.pep | SRF-TF::K-box | 9-59::85-175 |
| 178 | PHE0006981_9158.pep | GRAS | 149-456 |

TABLE 11

Pfam domain annotation

| | | | | | | |
|---|---|---|---|---|---|---|
| PEP | | | | | | |
| SEQ | | | | | | |
| ID | | | | | | |
| NO | GENE ID | Pfam domain name | Begin | Stop | Score | E-value |

| | | | | | | |
|---|---|---|---|---|---|---|
| 154 | PHE0001067_8154.pep | Homeobox | 97 | 158 | 68 | 2.70E−17 |
| 106 | PHE0002062_5913.pep | Myb_DNA-binding | 14 | 61 | 44.5 | 3.20E−10 |
| 106 | PHE0002062_5913.pep | Myb_DNA-binding | 67 | 112 | 47.8 | 3.20E−11 |
| 140 | PHE0002149_7487.pep | Myb_DNA-binding | 24 | 69 | 54.4 | 3.40E−13 |
| 171 | PHE0002149_8748.pep | Myb_DNA-binding | 24 | 69 | 54.4 | 3.40E−13 |
| 107 | PHE0002531_5926.pep | zf-Dof | 39 | 101 | 133.7 | 4.60E−37 |
| 152 | PHE0002531_7985.pep | zf-Dof | 39 | 101 | 133.7 | 4.60E−37 |
| 151 | PHE0003473_7927.pep | zf-C2H2 | 72 | 94 | 25.6 | 0.00016 |
| 151 | PHE0003473_7927.pep | zf-C2H2 | 149 | 171 | 20.5 | 0.0055 |
| 138 | PHE0003664_7436.pep | AP2 | 21 | 84 | 135.2 | 1.60E−37 |
| 166 | PHE0003664_8637.pep | AP2 | 21 | 84 | 135.2 | 1.60E−37 |
| 137 | PHE0003673_7430.pep | Response_reg | 13 | 126 | 104.9 | 2.20E−28 |
| 137 | PHE0003673_7430.pep | Myb_DNA-binding | 197 | 247 | 46.4 | 8.90E−11 |
| 188 | PHE0004332_PMON95104.pep | AP2 | 104 | 168 | 156.7 | 5.40E−44 |
| 187 | PHE0004356_PMON93862.pep | B3 | 23 | 128 | 64.1 | 4.20E−16 |
| 183 | PHE0004357_PMON94163.pep | AP2 | 135 | 199 | 150.2 | 5.10E−42 |
| 153 | PHE0004463_8059.pep | AP2 | 6 | 69 | 116.5 | 7.10E−32 |
| 186 | PHE0004463_PMON94432.pep | AP2 | 6 | 69 | 116.5 | 7.10E−32 |
| 185 | PHE0004624_PMON94400.pep | B3 | 141 | 246 | 110.7 | 4.00E−30 |
| 185 | PHE0004624_PMON94400.pep | Auxin_resp | 268 | 350 | 198.6 | 1.30E−56 |
| 185 | PHE0004624_PMON94400.pep | AUX_1AA | 640 | 805 | -72.2 | 0.00025 |
| 96 | PHE0004633_5508.pep | HLH | 104 | 152 | 39.4 | 1.10E−08 |
| 189 | PHE0004644_PMON95096.pep | HLH | 327 | 374 | 36.7 | 7.20E−08 |
| 184 | PHE0004646_PMON94352.pep | NAM | 17 | 139 | 58.4 | 2.20E−14 |
| 180 | PHE0004646_PMON94356.pep | NAM | 17 | 139 | 58.4 | 2.20E−14 |
| 182 | PHE0004648_PMON95051.pep | B3 | 13 | 105 | 117 | 4.90E−32 |
| 182 | PHE0004648_PMON95051.pep | B3 | 148 | 244 | 110.3 | 5.20E−30 |
| 181 | PHE0004723_PMON94660.pep | AUX_1AA | 6 | 173 | 339.7 | 4.50E−99 |
| 190 | PHE0004723_PMON95121.pep | AUX_1AA | 6 | 173 | 339.7 | 4.50E−99 |
| 97 | PHE0004738_5674.pep | NAM | 96 | 239 | 184.9 | 1.80E−52 |
| 98 | PHE0004814_5801.pep | KNOX1 | 38 | 82 | 63.3 | 7.00E−16 |
| 98 | PHE0004814_5801.pep | KNOX2 | 92 | 147 | 83.5 | 6.00E−29 |
| 98 | PHE0004814_5801.pep | ELK | 203 | 224 | 34.1 | 4.50E−07 |
| 133 | PHE0004816_7303.pep | HLH | 19 | 68 | 62.5 | 1.30E−15 |
| 136 | PHE0004816_7418.pep | HLH | 19 | 68 | 62.5 | 1.30E−15 |
| 135 | PHE0004816_7421.pep | HLH | 19 | 68 | 62.5 | 1.30E−15 |
| 139 | PHE0004816_7445.pep | HLH | 19 | 68 | 62.5 | 1.30E−15 |
| 99 | PHE0004817_5809.pep | HLH | 20 | 69 | 57.6 | 3.70E−14 |
| 100 | PHE0004817_5810.pep | HLH | 20 | 69 | 57.6 | 3.70E−14 |
| 103 | PHE0004817_5901.pep | HLH | 20 | 69 | 57.6 | 3.70E−14 |
| 101 | PHE0004821_5819.pep | HLH | 105 | 154 | 61.6 | 2.40E−15 |
| 102 | PHE0004828_5826.pep | HLH | 107 | 156 | 60 | 7.00E−15 |
| 104 | PHE0004861_5910.pep | GRAS | 26 | 325 | 369.5 | 4.70E−108 |
| 105 | PHE0004863_5912.pep | AT_hook | 121 | 133 | 17.5 | 0.02 |
| 105 | PHE0004863_5912.pep | AT_hook | 182 | 194 | 12.6 | 0.14 |
| 105 | PHE0004863_5912.pep | DUF296 | 212 | 332 | 177.3 | 3.40E−50 |
| 119 | PHE0004877_7030.pep | Response_reg | 13 | 126 | 104.9 | 2.20E−28 |
| 119 | PHE0004877_7030.pep | Myb_DNA-binding | 197 | 247 | 46.4 | 8.90E−11 |
| 108 | PHE0004914_5971.pep | Myb_DNA-binding | 11 | 60 | 22.4 | 0.0014 |
| 108 | PHE0004914_5971.pep | Myb_DNA-binding | 117 | 164 | 49.3 | 1.20E−11 |
| 109 | PHE0004924_5982.pep | TCP | 38 | 253 | 139.2 | 1.00E−38 |
| 110 | PHE0004925_5983.pep | SBP | 58 | 136 | 173.4 | 5.30E−49 |
| 111 | PHE0004938_5994.pep | GRAS | 154 | 454 | 524.3 | 1.20E−154 |
| 159 | PHE0004938_8370.pep | GRAS | 154 | 454 | 524.3 | 1.20E−154 |
| 112 | PHE0004957_6019.pep | zf-C2H2 | 68 | 90 | 21.6 | 0.0026 |
| 113 | PHE0004958_6020.pep | zf-Dof | 104 | 166 | 140.5 | 4.20E−39 |
| 114 | PHE0004959_6021.pep | AP2 | 128 | 191 | 141.1 | 2.70E−39 |
| 115 | PHE0004974_6040.pep | B3 | 148 | 253 | 114.1 | 3.60E−31 |
| 115 | PHE0004974_6040.pep | Auxin_resp | 275 | 357 | 156.9 | 4.80E−44 |
| 115 | PHE0004974_6040.pep | AUX_1AA | 623 | 809 | -63.7 | 6.00E−05 |
| 116 | PHE0004975_6041.pep | B3 | 136 | 241 | 113.4 | 6.10E−31 |
| 116 | PHE0004975_6041.pep | Auxin_resp | 263 | 345 | 170 | 5.40E−48 |
| 117 | PHE0004987_6056.pep | Myb_DNA-binding | 21 | 72 | 48.3 | 2.30E−11 |
| 173 | PHE0004987_8771.pep | Myb_DNA-binding | 21 | 72 | 48.3 | 2.30E−11 |
| 118 | PHE0005005_7034.pep | Myb_DNA-binding | 96 | 143 | 54 | 4.60E−13 |
| 124 | PHE0006004_7082.pep | NAM | 18 | 147 | 257.9 | 1.90E−74 |
| 167 | PHE0006004_8667.pep | NAM | 18 | 147 | 257.9 | 1.90E−74 |
| 125 | PHE0006022_7105.pep | EIN3 | 30 | 426 | 983.5 | 7.20E−293 |
| 168 | PHE0006022_8690.pep | EIN3 | 30 | 426 | 983.5 | 7.20E−293 |
| 126 | PHE0006023_7240.pep | HLH | 160 | 210 | 36.8 | 6.80E−08 |
| 172 | PHE0006023_8762.pep | HLH | 160 | 210 | 36.8 | 6.80E−08 |
| 120 | PHE0006057_7048.pep | HLH | 12 | 61 | 60.5 | 5.10E−15 |
| 121 | PHE0006057_7053.pep | HLH | 12 | 61 | 59.8 | 8.10E−15 |
| 150 | PHE0006057_7929.pep | HLH | 12 | 61 | 60.5 | 5.10E−15 |
| 122 | PHE0006070_7067.pep | bZIP_2 | 96 | 153 | 65.7 | 1.30E−16 |
| 122 | PHE0006070_7067.pep | bZIP_1 | 96 | 156 | 18.3 | 0.0014 |
| 123 | PHE0006073_7072.pep | bZIP_1 | 96 | 156 | 18.3 | 0.0014 |
| 123 | PHE0006073_7072.pep | bZIP_2 | 96 | 153 | 65.7 | 1.30E−16 |
| 128 | PHE0006237_7261.pep | AP2 | 6 | 69 | 121.7 | 1.90E−33 |
| 130 | PHE0006237_7268.pep | AP2 | 6 | 69 | 121.7 | 1.90E−33 |
| 129 | PHE0006237_7274.pep | AP2 | 6 | 69 | 121.7 | 1.90E−33 |
| 131 | PHE0006237_7277.pep | AP2 | 6 | 69 | 121.7 | 1.90E−33 |
| 132 | PHE0006237_7284.pep | AP2 | 6 | 69 | 121.7 | 1.90E−33 |
| 141 | PHE0006290_7498.pep | zf-B_box | 1 | 47 | 44.6 | 3.00E−10 |
| 141 | PHE0006290_7498.pep | zf-B_box | 48 | 90 | 23.5 | 0.00039 |
| 141 | PHE0006290_7498.pep | CCT | 355 | 393 | 72.3 | 1.40E−18 |
| 169 | PHE0006290_8689.pep | zf-B_box | 1 | 47 | 44.6 | 3.00E−10 |
| 169 | PHE0006290_8689.pep | zf-B_box | 48 | 90 | 23.5 | 0.00039 |
| 169 | PHE0006290_8689.pep | CCT | 355 | 393 | 72.3 | 1.40E−18 |
| 134 | PHE0006291_7319.pep | zf-B_box | 3 | 50 | 56.9 | 6.10E−14 |
| 134 | PHE0006291_7319.pep | CCT | 309 | 347 | 69.6 | 9.10E−18 |
| 155 | PHE0006350_8201.pep | GRAS | 98 | 403 | 400 | 3.20E−117 |
| 143 | PHE0006384_7737.pep | Myb_DNA-binding | 14 | 61 | 43.1 | 8.70E−10 |
| 143 | PHE0006384_7737.pep | Myb_DNA-binding | 67 | 112 | 50 | 7.30E−12 |
| 144 | PHE0006384_7789.pep | Myb_DNA-binding | 14 | 61 | 43.1 | 8.70E−10 |
| 144 | PHE0006384_7789.pep | Myb_DNA-binding | 67 | 112 | 50 | 7.30E−12 |
| 147 | PHE0006384_7839.pep | Myb_DNA-binding | 14 | 61 | 43.1 | 8.70E−10 |
| 147 | PHE0006384_7839.pep | Myb_DNA-binding | 67 | 112 | 50 | 7.30E−12 |
| 142 | PHE0006423_7664.pep | Myb_DNA-binding | 14 | 61 | 51.6 | 2.50E−12 |
| 142 | PHE0006423_7664.pep | Myb_DNA-binding | 67 | 112 | 35.1 | 2.20E−07 |
| 170 | PHE0006423_8696.pep | Myb_DNA-binding | 14 | 61 | 51.6 | 2.50E−12 |
| 170 | PHE0006423_8696.pep | Myb_DNA-binding | 67 | 112 | 35.1 | 2.20E−07 |
| 148 | PHE0006448_7859.pep | RWP-RK | 553 | 604 | 110.7 | 3.80E−30 |
| 148 | PHE0006448_7859.pep | PB1 | 741 | 823 | 92.6 | 1.10E−24 |
| 149 | PHE0006504_7876.pep | F-box | 49 | 104 | 29.5 | 1.10E−05 |
| 149 | PHE0006504_7876.pep | Tub | 115 | 424 | 691.2 | 7.00E−205 |
| 145 | PHE0006507_7828.pep | CBFD_NFYB_HMF | 1 | 40 | 31.5 | 2.80E−06 |
| 146 | PHE0006509_7846.pep | SBP | 64 | 142 | 188.1 | 1.90E−53 |
| 158 | PHE0006527_8369.pep | CBFD_NFYB_HMF | 26 | 91 | 130.9 | 3.20E−36 |
| 157 | PHE0006546_8310.pep | Response_reg | 28 | 141 | 92.2 | 1.40E−24 |
| 157 | PHE0006546_8310.pep | Myb_DNA-binding | 225 | 275 | 45.6 | 1.50E−10 |
| 156 | PHE0006605_8233.pep | GATA | 223 | 258 | 67.8 | 3.20E−17 |
| 163 | PHE0006752_8521.pep | SRF-TF | 9 | 59 | 117.1 | 4.70E−32 |
| 163 | PHE0006752_8521.pep | K-box | 75 | 174 | 163.9 | 3.80E−46 |
| 160 | PHE0006774_8489.pep | CBFD_NFYB_HMF | 34 | 106 | 112 | 1.60E−30 |
| 161 | PHE0006778_8503.pep | CBFD_NFYB_HMF | 34 | 106 | 106.2 | 8.90E−29 |
| 164 | PHE0006779_8565.pep | CBFD_NFYB_HMF | 34 | 106 | 106.5 | 7.30E−29 |
| 162 | PHE0006780_8502.pep | CBFD_NFYB_HMF | 34 | 106 | 102.1 | 1.50E−27 |
| 165 | PHE0006781_8573.pep | CBFD_NFYB_HMF | 34 | 106 | 95.6 | 1.30E−25 |
| 174 | PHE0006858_8859.pep | SRF-TF | 9 | 59 | 115.3 | 1.60E−31 |
| 174 | PHE0006858_8859.pep | K-box | 74 | 173 | 148.4 | 1.70E−41 |
| 175 | PHE0006860_8863.pep | SRF-TF | 9 | 59 | 121.5 | 2.20E−33 |
| 175 | PHE0006860_8863.pep | K-box | 74 | 172 | 152.7 | 8.70E−43 |
| 177 | PHE0006951_9137.pep | zf-C2H2 | 152 | 175 | 20.1 | 0.0071 |
| 179 | PHE0006951_9173.pep | zf-C2H2 | 152 | 175 | 20.1 | 0.0071 |
| 176 | PHE0006955_9129.pep | SRF-TF | 9 | 59 | 95.2 | 1.80E−25 |
| 176 | PHE0006955_9129.pep | K-box | 85 | 175 | 22.5 | 5.10E−06 |
| 178 | PHE0006981_9158.pep | GRAS | 149 | 456 | 481 | 1.30E−141 |

TABLE 12
Description of Pfam domain

| | Accession | Gathering | |
|---|---|---|---|
| Pfam domain name | number | cutoff | Domain description |
| AP2 | PF00847.9 | 0 | AP2 domain |
| AT_hook | PF02178.8 | 3.6 | AT hook motif |
| AUX_IAA | PF02309.6 | −83 | AUX/IAA family |
| Auxin_resp | PF06507.3 | 25 | Auxin response factor |
| B3 | PF02362.12 | 26.5 | B3 DNA binding domain |
| CBFD_NFYB_HMF | PF00808.12 | 18.4 | Histone-like transcription factor (CBF/NF-Y) |
| | | | and archaeal histone |
| CCT | PF06203.4 | 25 | CCT motif |
| DUF296 | PF03479.4 | −11 | Domain of unknown function (DUF296) |
| EIN3 | PF04873.3 | −137.6 | Ethylene insensitive 3 |
| ELK | PF03789.3 | 25 | ELK domain |
| F-box | PF00646.21 | 13.6 | F-box domain |
| GATA | PF00320.16 | 28.5 | GATA zinc finger |
| GRAS | PF03514.4 | −78 | GRAS family transcription factor |
| HLH | PF00010.15 | 8.2 | Helix-loop-helix DNA-binding domain |
| Homeobox | PF00046.18 | −4.1 | Homeobox domain |
| K-box | PF01486.7 | 0 | K-box region |
| KNOX1 | PF03790.3 | 25 | KNOX1 domain |
| KNOX2 | PF03791.3 | 25 | KNOX2 domain |
| Myb_DNA-binding | PF00249.19 | 2.8 | Myb-like DNA-binding domain |
| NAM | PF02365.5 | −19 | No apical meristem (NAM) protein |
| PB1 | PF00564.13 | 12.3 | PB1 domain |
| RWP-RK | PF02042.5 | 25 | RWP-RK domain |
| Response_reg | PF00072.12 | 4 | Response regulator receiver domain |
| SBP | PF03110.5 | 25 | SBP domain |
| SRF-TF | PF00319.8 | 11 | SRF-type transcription factor (DNA-binding |
| | | | and dimerisation domain) |
| TCP | PF03634.3 | −38 | TCP family transcription factor |
| Tub | PF01167.7 | −98 | Tub family |
| bZIP_1 | PF00170.10 | 16.5 | bZIP transcription factor |
| bZIP_2 | PF07716.4 | 15 | Basic region leucine zipper |
| zf-B_box | PF00643.14 | 15.3 | B-box zinc finger |
| zf-C2H2 | PF00096.15 | 16.8 | Zinc finger, C2H2 type |
| zf-Dof | PF02701.5 | 25 | Dof domain, zinc finger |

### EXAMPLE 10

### Selection of Transgenic Plants with Enhanced Agronomic Trait(s)

[0093] This example illustrates the preparation and identification by selection of transgenic seeds and plants derived from transgenic plant cells of this invention where the plants and seed are identified by screening for an enhanced agronomic trait imparted by expression of a protein selected from the group including the homologous proteins identified in Example 6. Transgenic plant cells of corn, soybean, cotton, canola, wheat and rice are transformed with recombinant DNA for expressing each of the homologs identified in Example 6. Plants are regenerated from the transformed plant cells and used to produce progeny plants and seed that are screened for enhanced water use efficiency, enhanced cold tolerance, increased yield, enhanced nitrogen use efficiency, enhanced seed protein and enhanced seed oil. Plants are identified exhibiting enhanced traits imparted by expression of the homologous proteins.

What is claimed is:

1. A plant cell nucleus with stably integrated, recombinant DNA construct, wherein said recombinant DNA construct comprises a promoter that is functional in a plant cell and that is operably linked to a DNA segment encoding a protein comprising an amino acid sequence of SEQ ID NO: 177; and
wherein said recombinant DNA construct is stably integrated into a chromosome in said plant cell nucleus which is selected by screening a population of transgenic plants that have said recombinant DNA construct and an enhanced trait as compared to control plants that do not have said recombinant DNA construct in their nuclei; and
wherein said enhanced trait is selected from group of enhanced traits consisting of enhanced water use efficiency, enhanced cold tolerance, enhanced heat tolerance, enhanced high salinity tolerance, enhanced shade tolerance, increased yield, enhanced nitrogen use efficiency, enhanced seed protein and enhanced seed oil.

2. A recombinant DNA construct comprising a promoter that is functional in a plant cell and that is operably linked to a DNA segment that encodes:
a. at least one protein having an amino acid sequence comprising a Pfam domain module selected from the group consisting of Homeobox, Myb_DNA-binding::Myb_DNA-binding, Myb_DNA-binding, zf-Dof, zf-C2H2::zf-C2H2, AP2, Response_reg:: Myb_DNA-binding, B3, B3::Auxin_resp::AUX_IAA, HLH, NAM, B3::B3, AUX_IAA, KNOX1::KNOX2::ELK, GRAS, AT_hook::AT_HOOK::DUF296, TCP, SBP; zf-C2H2, B3::Auxin_resp, EIN3, bZIP_{—}2, zf-B_box::zf-B_box, zf-B_box::CCT, RWP-RK::PB1, F-box::TUB, CBFD_NFYB_HMF, GATA, SRF-TF, K-box, and SRF-TF::K-box;
b. a protein comprising an amino acid sequence with at least 90% identity to a consensus amino acid sequence as set forth in SEQ ID NO: 2201;
c. a protein having an amino acid sequence having at least 70% identity to an amino acid sequence selected from the group consisting of SEQ ID NOs 96 through SEQ ID NO: 193; or
d. a protein having an amino acid sequence selected from the group consisting of SEQ ID NO: 96 through SEQ ID NO: 193;
and wherein said recombinant DNA construct is stably integrated into a chromosome in a plant cell nucleus which is selected by screening a population of transgenic plants that have said recombinant DNA construct and an enhanced trait as compared to control plants that do not have said recombinant DNA construct in their nuclei; and wherein said enhanced trait is selected from group of enhanced traits consisting, of enhanced water use efficiency, enhanced cold tolerance, enhanced heat tolerance, enhanced high salinity tolerance, enhanced shade tolerance, increased yield, enhanced nitrogen use efficiency, enhanced seed protein and enhanced seed oil.

3. A transgenic plant cell nucleus comprising a recombinant DNA construct of claim 2.

4. A transgenic plant cell having a plant cell nucleus of claim 3.

5. The transgenic plant cell of claim 4 wherein said transgenic plant cell is homozygous for said recombinant DNA construct.

6. The transgenic plant cell of claim 4 further comprising DNA expressing a protein that provides tolerance from exposure to an herbicide applied at levels that are lethal to a wild type of said plant cell.

7. The transgenic plant cell of claim 5 wherein said herbicide is a glyphosate, dicamba, or glufosinate compound.

8. A transgenic plant comprising a plurality of plant cells of claim 4.

9. The transgenic plant of claim 8 wherein said transgenic plant is homozygous for said recombinant DNA construct.

10. A transgenic seed comprising a recombinant DNA construct of claim 2.

11. The transgenic seed of claim 10 from a corn, soybean, cotton, canola, alfalfa, wheat or rice plant.

12. A transgenic pollen grain comprising a recombinant DNA construct of claim 2.

13. A method for manufacturing transgenic seeds that can be used to produce a crop of transgenic plants with an enhanced trait resulting from expression of a DNA segment in a plant cell nucleus comprising a recombinant DNA construct of claim 2, wherein said method comprises:
(a) providing a population of plants produced from a parental plant having a recombinant DNA construct of claim 2;
(b) screenings said population of plants for at least one of said enhanced trait and said recombinant DNA construct, wherein individual plants in said population can exhibit said trait at a level less than, essentially the same as or greater than the level that said trait is exhibited in control plants which do not contain said recombinant DNA construct, wherein said enhanced trait is selected from the group of enhanced traits consisting of enhanced water use efficiency, enhanced cold tolerance, enhanced heat tolerance, enhanced high salinity tolerance, enhanced shade tolerance, increased yield, enhanced nitrogen use efficiency, enhanced seed protein and enhanced seed oil;
(c) selecting from said population one or more plants that exhibit said trait at a level greater than the level that said trait is exhibited in control plants; and
(d) collecting seeds from selected plant selected from step c.

14. The method of claim 13, wherein said method further comprises:
(e) verifying that said recombinant DNA construct is stably integrated in said selected plants; and
(f) analyzing tissue of said selected plant to determine the expression of a protein having the function of a protein having an amino acid sequence selected from the group consisting of one of SEQ ID NO: 96 through SEQ ID NO: 193.

15. The method of claim 14 wherein said seed is corn, soybean, cotton, alfalfa, canola wheat or rice seed and said recombinant DNA construct is homozygous in said plant.

16. A method of producing hybrid corn seed comprising:
(a) acquiring hybrid corn seed from a herbicide tolerant corn plant which also has a stably-integrated, recombinant DNA construct of claim 2;
(b) producing corn plants from said hybrid corn seed, wherein a fraction of the plants produced from said hybrid corn seed is homozygous for said recombinant DNA construct, a fraction of the plants produced from said hybrid corn seed is hemizygous for said recombinant DNA construct, and a fraction of the plants produced from said hybrid corn seed has none of said recombinant DNA construct;
(c) selecting corn plants which are homozygous or hemizygous for said recombinant DNA construct by treating with an herbicide;
(d) collecting seeds from herbicide-treated-surviving corn plants and planting said seed to produce further progeny corn plants;
(e) repeating steps (c) and (d) at least once to produce an inbred corn line; and
(f) crossing said inbred corn line with a second corn line to produce hybrid corn seed.

The application's sequence listing, which the Patent Office published only in electronic form, follows.

SEQUENCE LISTING (2205 sequences)

SEQ ID NO: 1 - DNA, 534 bp, Zea mays
atgtcccagatctcagagatggacagcgaggaggtcggagggagcagcccggaggcttccggcggcggcggcagggggtacatccctgggtacccaatgggctctgggtgggaggactcgtcggctctcttgtcagacaatttgtctggcgtcaaacgcccccgggactcgtcggagcctggccagagcggccttacgcaccagttcagcgtgcccaagacgtcgtccgagatggcaactattgagaaattcctccagttccaggacgccgtgccttgtaagatccgtgccaagcgggggtgcgccactcatccacgcagcatcgctgagagggtgaggagaacaaagatcagtgagcgaatccgaaagctgcaagaactcgttccaaatatggacaagcaaaccaacacatctgacatgctggatttggctgtcgactacatcaaggatctccagaagcaggttaaggtactaaaggagagccaagataactgcacctgctcagcaagcaagaaccagcagcactcctgctag

SEQ ID NO: 2 - DNA, 1495 bp, Oryza sativa
atgtacacctctcccacactccttgctctctcgtttgctcttctactgctcatcctcctcctctactactcgtcctctttgctctattcacagctagcaacaagaaggaggcttacacatgcatgtgcacggtctctgccggacgcatatgaatcaggcatgaatagggggcacatcagcagctcggagctcatcgacgccaagctcgaggaacgccggatctccacggccaagcactgccccagctgcggcaacaagctcgactgcaaaccggattgggtggggctaccggcaggagtcaagttcgatccgacggaccaggagttgatcgagcacctcgaggccaaagtgagggaagaaggctcaagatctcatcctctcatcgatgagttcatacccacgatagaaggggaggacggcatatgctacacccaccctgagaaacttccaggtgtgacaagggacggcctgagcaagcacttcttccaccggccgtcgaaggcgtacacgacggggacgaggaagcggcggaagatccagacggagtgcgacgtgcagaagggggagacgaggtggcacaagaccggcaagacccggccggtgatggtgagcggccggcagaaggggtgcaagaagatactggtcctctacaccaacttcggcaagcaccgcaagccggagaagaccaactgggtgatgcaccagtaccacctcggcgacctcgaggaggagaaggaaggggagctcgtcgtctgcaagatcttctaccagacgcagcctcggcagtgcagctggtcctccgaccgcggcggcggcgccgccgccaccgcatccgccgtgacgacggcggcggtgcagcaggatcagcagcgcaggagggacagcggcagcggcagctgctcgtcgacgagggaccacgaggtgtcggcgacgtcctactcgacggccgggtacgccgtcgccgccgccgtcgagatgcagcatttgaagcatgccgccgaccatttcagcttcgcgcctttcaggaagagtttcgaggaggttggtataagtggtgatcaggtacactccaatcagcttgggaggtcggagcagcagcatgctggccaggaacaacagccgcaccggccgttgcttgcaaccacgacggcggtgcctgccacggccttcctgatcagccggccgacgaaccctgtatcaaatatagtgccaccagcaatgcagcatgcatctgtcgttcttgatcatgatcagttccacgtgccagcaatccttctccaccacgacaaatttcagcagcagcagcaacaaaagcttgacaggaggtctgccggcttggaggaactgataatgggctgcacgtcttcgagcacaaaaggagaagcttcaattcctcactcccaagagacagaatggccttaccagccatactggactcctgacaaccaggatcatcatggatagtagcaacaaggctgcttttgatatgcattag

SEQ ID NO: 3 - DNA, 900 bp, Zea mays
atgtcgttccactaccacgaccacgggctgtccatggacgccgccgcgtcggcggcggccgccgccgcgtcgtcgccgaaccctagcggcttctcccccggcatcggcggggaaagggagaaggcggccatcgcggcgcacccgctgtacgagcgcctcctggaggcgcacgtcgcctgcctacgcgtcgccacccccgtcgaccagctcccccgcatcgacgcgcagatcgccgcgcgccccccgccgctcgccgcggccgccggggccgcggccgcgggagggccgtccggcggggaggagctcgacctcttcatgacgcactatgtattgctcctttgctcattcaaggagcagttgcagcagcatgtacgtgttcatgcaatggaagcagtgatgggttgctgggagcttgaacaatctttacaaagcctaacaggggcatctccgggtgaaggcactggaggaaccatgtctgacgatgaagataaccaggtggatagtgaagccaacatgttcgatggaaatgatggatcagacggtatgggctttggccccctgatactaacagagggtgaacggtccttagttgagcgtgtacggaaggagctgaagaacgagcttaagcagggttacaaggaaaagcttgtcgatatcagggaagagatcatgcgcaaacgcagggctgggaaacttcctggagataccgcatctgtactgaaagcttggtggcaagctcattccaagtggccgtacccaactgaagacgacaaggccagactggtgcaggaaacggggttgcagctaaagcagatcaacaactggttcattaaccaacgcaaacggaactggcacagcaacccaacatcctcggctgaaaagaccaagaagaaaaggtag

SEQ ID NO: 4 - DNA, 645 bp, Zea mays
atggaggatggcagcagtgctccaagacgggctactccccccacccgcaggagcagatctgccgacttccacaacttttcagaaaggaggagaagggacaggatcaacgagaagctgagagcgttgcaggagcttcttccaaactgcaccaagaccgacaaagtttccatgctagatgaagcgatcgactacctaaaatccctccagctacagcttcagatgctggtcatggggaaggggggaggaatggcaccggtggttcctcctgagctgcagcagtacatgcactacatcacggccgaccccgcccaccagatgatgcctccgccgctgcggccctccgccgggcagctgcagcccgccgccggccggcagtttcagataacccaagcagcagcagcagcagccaacaacgacaacgacccccagcgacgacgacagtccaacgtcgagtcggacttcttgagccagatgcagaacctgcacccctccgatcagccgcctcatcatcacaacttcctcaggccgccgagattgcagctctttacgccggaacagaggggcggcggcggcggcctgcctaccacgagccacaacgccggctggatttccgggaggagttcctcgtataattttatggagtag

SEQ ID NO: 5 - DNA, 645 bp, Zea mays; identical to SEQ ID NO: 4

SEQ ID NO: 6 - DNA, 936 bp, Zea mays
atgaacgagcaggggctcggtggtctcggcgggggccgcggggccgtgcaggggcacgggcgggaggcgatggcgctcctgcagcaccagcagcttcaacagcaacggcggcagctggaggaggaggatgaggtgcggcgccagatgttcggcggggtggcggcgttcccggcagcgctgggccacggccagcaggtggactacggggaggacgccggcgggctcggggacagcgacgcgggcgggtcggagcccgagccaccactggagcggacgcgcggggggtccggcggcggcggcaagcggagccgcgctgccgaggtgcacaacctctccgagaagaggaggaggagcaagatcaacgagaagatgaaagcgctgcagagcctgatacccaactccaacaagaccgacaaggcatccatgcttgacgaggccattgagtatctgaagcaactgcagctccaagtgcagatgctgtctatgagaaatggtgtttacttgaaccctccatatttgtctggcacaattgagcctgcacaagcatcacaaatgtttgctgcagttggtgggggcaacattacagcgtcaagctctggggcagtgatgccaccagtaaaccaaagttcaggacttcaagtatttgatccattaaatcctccacgagaccaaccactgtcttttgtattaccaaatgtagacaaaaccattcaagaagctccctttcacttggaatcatcgcagttccaccctcgaccatttcgaatgcctgaatcttctgagatgatgcttccaggtgaggtagtggcaaagcaccagctaacttcaattcaaggaagagttagtatgccaggaattggtatgaaccccattaggcaagaatcatccactgtaaaagctgatcagtttgatggttgctcacataacaaagagtag

SEQ ID NO: 7 - DNA, 1087 bp, Glycine max
ccgttcatcttaacctttccactccatgcctgctggatcctgcacctccaacgctgctcaacaaaacgtaaatgcacaccacccttctttcacggcgtcacagctccaagatgggaagatcttggccgttgattccaccgcttcttttgtctccggttctgctgcttgcagttccttcaagggccatggtgcttctgctgcaaatgtgtcttcttcttctgctggagtgagtgagaacgagaatgatgactatgattgtgagagtgaggagggtgttgaggctccggccgaagaagttccaacaaaggctgcttcttctaggagttcatctaaaagatcaagagctgcagaagttcataatttgtcagagaagcggagaaggggtaggatcaacgagaaaatgaaggctttgcaaaacctaattccaaattctaacaagacagataaggcttcaatgctcgatgaagctattgaataccttaaacagcttcagctacaagtacagatgctgtcaatgagaaatgggttgagtttgcatcctatgtgctttcctgaaggcttgcagcctctgcagttgtctcagatgggtatggaattaagtgaaagaaacaggtttacctctttaaacatgtcagctactctgcctctgcaccaagacaacaatcccttgcactatgcatccaatctacctaacaaacacaatctcccaaatcagccatctgtgccctatcctccatacattgacaacccagaaacttctttcggtctggaaccccgaatccaaacggatatgaaacctcttcaacacaaaggaggatcttctgagccaatacgaggggaagacattttgcagcaccagcaatcaagtggtatccattcagatgccaatacattaggtggttctcaagttgtcaaagaattcgaatcaggcacgagactatcattcccttttgacacgcaagcatgtgaacccaaagacaacagcaactcttcgcaaccatgcattggcggaagagatcattcaggagtgatcataagaaatagtgagaccaacattgttggtaggtaggtatatgatgctttagaa

SEQ ID NO: 8 - DNA, 645 bp, Zea mays; identical to SEQ ID NO: 4

SEQ ID NO: 9 - DNA, 1326 bp, Oryza sativa
atgaaggcgaagcgcgcggccgacgacgaggaggaaggcggcgagcgggagcgcgcgcgtgggaagcggctggctgctgaggggaagcaagggttagtggtggtgagtacgggggaggaggaggaggcggcggcggagacgcgtgggctgcggctgcttagtttgttgctgaggtgtgcggaggcggtggcgatggaccagctgccggaggcgcgggacctgctgccggagatcgccgagctggcgtcgccgttcgggtcgtcgcccgagcgcgtcgcggcctacttcggggacgcgctgtgcgcgcgcgtgctgagctcctacctgggggcctactcgccgctggcgctccgcccgctcgccgccgcgcagagccgccgcatctccggcgcgttccaggcgtacaacgcgctgtcgccgctcgtcaagttctcgcacttcacggccaaccaggccatcttccaggcgctcgacggcgaggaccgcgtccacgtgatcgacctcgacatcatgcaggggctgcagtggccgggcctcttccacatcctcgcctcccgccccaccaagccgcgctcgctccggatcaccggcctcggcgcgtcgctcgacgtcctcgaggccaccggccgccgcctcgccgacttcgccgcgtcgctcggcttgcccttcgagttccggcccatcgaggggaagatcgggcacgtcgccgacgccgccgcgctcctcggcccgcgccaccacggggaggccaccgttgtgcactggatgcaccactgcctctacgacgtgacgggctccgacgccggcacggtgcgcctgctcaagagcctccggccgaagctgatcaccatcgtggagcaggacctcggccacagcggcgacttcctgggccgcttcgtggaggcgctgcactactactcggcgctgttcgacgcgctgggcgacggcgcgggggccgccgaggaggaggcggcggagcggcacgcggtggagcgtcagctcctcggcgcggagatacggaacatcgtcgccgtcgggggccccaagcgcaccggcgaggtgcgcgtcgagcggtggggcgacgagctgcggcgagcggggttccggccggtgaccctggccggcagccccgccgcgcaggcgaggctgcttcttggcatgtacccatggaagggctacactctcgtcgaagaggacggctgcctcaagctcgggtggaaggacctgtccctgctcaccgcctcgtcgtgggagccgacagacggcgacgccgacgccgacgtcgccgtcgccggcgatacccaccatgagagccacgattcttag

SEQ ID NO: 10 - DNA, 1167 bp, Zea mays
atggacgggagggagtccacggtggcgtcggggcccaacttctcgtccttcttcgcgcagcaccggggcatcggggcgccgggtgtccccggccactcgcaggggcttcacgccccgccgcccggtgggtaccggcagcatcttgatgctgtctctgcggggtatgcattccagaccccgcatgttgggggtcccagcattgggcaggggtacgaggcctcacctcatgcggcacagcacagcgccggtggcggctctggctccggtggttgtggtggtatggacattggcatgggtgcggccgtgagtgccgatgttaagggggatcaggggagtgggcctggccaggatgagcaggtgaagaagaagcggggcaggccaagaaaatataagcctgatgggtctgtgactcttgggttatcacccacttcatcatcgacgcctcactcgtccagctcggggatgggaaccatggttaacactccaggctctggatttgggtctggaggatcagggggttcaggttctggtgcaccatcagagaaacgtggcagggggcggccacctggctctggaaagatgcaacagctggcttcgcttggaaagtggtttcttggctctgttggaacaggttttactccgcatgtgattattattcaaccaggagaggacgttgctgcgagaataatggccttctcacagcaaggcccaagggcagtgtgcatcatttcagcaactggagctatttctacagcaacccttcaccaggattcagactccggtggtgtggttacatatgagggccgatttgagatcctgtgcctttctgggtcatacttggtggtagaggatggtggcacacggacccgaagcggaggtctttgcatagctttgtgtggtcctgaccacagggttattggtgggagtgtaggcggagtcctgacagcagctggaacagttcaggtgatagtggggagcttcatgtacggaggttcgaagaagaacaaggtgaaagcggaggtggacatggagcccgaggaggtggcacccgcggagcacagtggcatggtccctcctgcgatgagtggcggcgggtgggaagcgggcatgatgaggcagatggactcgagaactcctgccattgatatcaactcgatccgcgggtag

SEQ ID NO: 11 - DNA, 975 bp, Zea mays
atggggaggccgccgtgctgcgacaaggtgggagtgaagaaagggccgtggacccccgaggaggacctcatgctcgtctcctatgtccaggagcacggccccgggaactggcgcgccgtgccgaccaacaccgggctgatgcgctgcagcaagagctgcaggttgcggtggacaaactacctccggccgggaatcaagcgcggcaactttaccgaccaggaggagaagctcatcatccacctccaggctctccttggcaaccggtgggcggcgatagcgtcctacttgccggagaggacggacaacgatatcaagaactactggaacacgcacctcaagaagaagctgaagaagatgcaggccggcgaagggggcgggggagacggcgacggcgcagcaggtgcctcggaaggcggcgccgtcgccaccgcaggcgcgggagggaagcgcccggccgtgcccaaggggcagtgggagcggcggctgcagaccgacatccacacggcgcggcaggctctgcgcgacgcgctctcgctggaaccttcgccttcggcgccgccgccggctaaggtggagcctctgccggcgaccgccccggggtacaagacgtacgcgtctagcgccgagaacatcgcgcggctgctggagggctggctgcgccccggcagcggagggggcaaggggcccgaggcgtcgggctcgacgtcgacgacggccacgacgcagcagcggccgcagtgctccggtgagggcgcggcgtccgcgtcggcgagccacagtggcggagcgcccgcgaacgcggcggcgcagacgcccgagtgctcgacggagaccagcaaggtggccggcgcgggctccgcgccgccggcgttctcgatgctggagagctggctgctcgacgacggcatggggcacggcgaggacgggctcatgaccgacgtggtgccactaggggaccccagtgagttcttttag

SEQ ID NO: 12 - DNA, 723 bp, Zea mays
atgcaggaggcgtcatcggcggcggcgggggccgagcccggccgtcgggcggcgcagcatcagttcgccggcgtggacctccggcggcccaaggggtacgcgccgccggcgccggcggtgagcgagggggacccgtgcccgcggtgtgcgtcgcgggacaccaagttctgctactacaacaactacaacacctcccagccgcgccacttctgcaagggctgccgccgctactggaccaagggcggcacgctgcgcaacgtccccgtcggcggcggcacccgcaagaagccctccttgtcgtcgtcgtcgtcgtcgtcctacgcggccgccgcggacgccgacaggcagcccaagaagaagcccgccagcaagaagcgccgcgtcgtggcgccggccccggagctcgccgccgcggccgacccaggcaagacggcacccaccacgacgacgacgacgacgacgacgagcgagatcaccacggagactggcgcgctggaggactccgactccctggcgcacctgctgctgcagcccgggacagaggacgcggaggccgtcgcgctcgggctcggcctctccgacttcccctccgccgggaaggcggtgctggacgacgaggactcgttcgtgtggcccgccgcgtcgttcgacatgggcgcgtgctgggccggcgcagggttcgccgacccggaccccgcatgcatcttcctcaacctcccgtag

SEQ ID NO: 13 - DNA, 702 bp, Glycine max
atgtttcaggagagcagcgtgacgcggtggccgactcagtggactcgctaccacgacaagctattcgagcgggcccttctggtcgtgccggaggatctgccggaccggtgggagaagatcgccgaccaggttcccggcaagtcggcggtggaggtaagggaacactacgaggccctcgtccacgacgtcttcgagatcgactccggccgagtcgaggtcccgagttacgtcgatgactcggtggcgatgccgcccagtggcggtgctggaatttctacgtgggacaacgctaatcagatctcattcggttccaagcttaaacaacaaggcgagaacgaaaggaagaagggcacgccttggactgaagaggaacacaggctgtttctcattgggcttagtaagtttgggaagggagattggagaagcatttcaagaaatgttgttgtgacaagaacaccaactcaagtagctagccatgcccagaaatactttcttcgccagaattcggtgaagaaagagaggaagagatcaagcattcatgacataacgactgtggacagtaactcagcgcctatgcccattgatcagacttgggttcctcctccgggtggttcactgcagcagtcacagcaatacccatcaagcaacatgcatgatcaaatgggtacgtttgggtattcaaactatggctttgacatgtag

SEQ ID NO: 14 - DNA, 1107 bp, Glycine max
atgatcaacagcacaaaagaagctgattttccactaaaacaagaaggtctttcatcaggtgatcatgaaaaggctaaggctccatcgacctcatcatcatcatcacaatggctaaaactgaaggatccaaggattgttcgtgtgtctcgagccttcggaggaaaagacaggcacagcaaggtgtgcacaataagagggctaagagatagaagagtgaggctttcagtccctacagcaattcacctctatgatctccaagataggcttggactcaaccaaccaagcaaggttgttgattggttgctcaatgcagcaaaacatgaaattgatgaacttccaccacttcctattcctccaggtaacttcacccttggttatccctctcttgtttcttgtaatgaagttagcacctctcgtgaaggttcaggccagaacactttattgtggaaaccaaaatcaggagaaatggttagtgatgataaagcaaattggatgaatagaagtgaaggagatgatgataataatcataataatagtaatggtaaagaaggaagcaataataatatttgtcatggtggtacacttgttttgccaaataatctcttgccaagaccaaaccatccttcttttttgagcttgatgaacattatgccatcacttggttaccaatgggaggctaataattcagctcatgatgttaatattggtcaatggcaaaaccatggatttcttaaccaaacagatgtacacagcatcaatgtggttccatttccatcaacattggctctatcaactgggagtgatactactactacttctcagattttggtgtgtcctcctcatggagcaacaacacagccatatttcccttcttcacatcatgttgcagcaatggagatgaatgcaagacaaatcaaccactatcagatgctgagttcaagttctcatcaaaatctcttggcaaattctctcaatccatcatcacagcaactcatgagccaatcagagaaattgccattcagcttgggaattaggcctaaacttttccattctcctaacagaagtgaaagccattcccaaaaagaccaggatttgccttccaagtag

SEQ ID NO: 15 - DNA, 1065 bp, Arabidopsis thaliana
atggagttgttaatgtgttcgggtcaggccgagtcaggtggttcttcttccaccgagtcttcttcactcagtggtggactcaggtttggtcagaagatctacttcgaggatggatccggatccagaagcaagaaccgggtcaataccgttcgtaagtcgtctaccacggcgaggtgccaagtggaaggttgtagaatggatctaagcaatgttaaagcttattactcgagacacaaagtttgttgcattcactctaaatcatctaaagtcattgtctctggtcttcatcaaaggttttgtcaacaatgtagcaggtttcaccagctttctgagtttgacttggagaaaagaagttgtcgcagaagactcgcttgtcataacgaacgacgaagaaaaccacaacccacaacggctcttttcacttctcattactctcgaatcgctccatctctttacggaaaccccaatgctgcaatgattaaaagcgttttgggagatcctactgcgtggtcaaccgcaagatcagtgatgcagcggcctggaccgtggcagattaatccagttagggaaacccatccacacatgaatgttttatcacatggaagctcaagctttactacatgtccagagatgataaacaacaatagcacagattcaagctgtgctctctctcttctgtcaaactcatacccaattcatcagcagcaacttcagacaccaacaaatacatggcgaccatcttctggtttcgactcgatgatctcattctccgataaggttacaatggctcagccaccgcccatttcaacccatcagccgcccatctcaacacatcagcagtacctcagccaaacttgggaagtcatcgcgggcgaaaagagcaattcacattatatgtctcctgtgagtcaaatctcggagccagcagatttccagataagcaatggcaccacaatgggtggatttgagctgtatcttcatcagcaggttctgaagcaatacatggaacccgagaacacaagagcttatgactcctctcctcaacatttcaattggtctctttag

SEQ ID NO: 16 - DNA, 1644 bp, Arabidopsis thaliana
atgaagagaggatacggagaaacatgggatccgccaccaaaaccactaccagcttctcgttccggagaaggtccttcaatggcggataagaagaaggctgatgatgacaacaacaacagcaacatggatgatgagcttcttgctgttcttggctacaaggttcgatcttctgagatggctgaagtagcacagaagcttgaacaacttgagatggtcttgtctaatgatgatgttggttctactgtcttaaacgactctgttcattataacccatctgatctctctaactgggtcgagagcatgctttctgagctgaacaacccggcttcttcggatcttgacacgacccgaagttgtgtggatagatccgaatacgatctcagagcaattccgggtctttctgcgtttccaaaggaagaggaagtctttgacgaggaagctagcagcaagaggatccgactcggatcgtggtgcgaatcgtcggacgagtcaactcggtccgtggtgctcgttgactctcaggagaccggagttagacttgtccacgcactagtggcgtgcgctgaggcgattcaccaggagaatctcaacttagctgacgcgctggtgaaacgcgtgggaacactcgcgggttctcaagctggagctatgggaaaagtcgctacgtattttgctcaagccttggctcgtcgtatttaccgtgattacacggcggagacggacgtttgcgcggcggtgaacccatctttcgaagaggttttggagatgcacttttacgagtcttgcccttacctgaagttcgctcatttcacggcgaaccaagcgattctagaagctgttacgacggcgcgtagagttcacgtcattgatttagggcttaatcaagggatgcaatggcctgctttaatgcaagctttagctctccgacccggtggacctccgtcgtttcgtctcaccggaatcggaccaccgcagacggagaattcagattcgcttcaacagttaggttggaaattagctcaattcgctcagaacatgggcgttgaattcgaattcaaaggcttagccgctgagagtttatcggatcttgaacccgaaatgttcgaaacccgacccgaatctgaaaccttagtggttaattcggtatttgagctccaccggttattagcccgatccggttcaatcgaaaagcttctcaatacggttaaagctattaaaccgagtatcgtaacggtggttgagcaagaagcgaaccacaacggaatcgtcttcctcgataggttcaacgaagcgcttcattactactcgagcttgtttgactcgctcgaagacagttatagtttaccgagtcaagaccgagttatgtcagaagtgtacttagggagacagatactcaacgttgttgcggcggaagggtccgatcgggtcgagcggcacgagacggctgcacagtggaggattcggatgaaatccgctgggtttgacccgattcatctcggatctagcgcgtttaaacaagcgagtatgcttttatcgctttacgctaccggagatggatacagagttgaagaaaatgacggatgtttaatgatagggtggcagacgcgaccactcatcacaacctcggcgtggaaactcgcctag

SEQ ID NO: 17 - DNA, 888 bp, Zea mays
atggccaagtactactggggtatgctgggcgccgcaaccaccacgacccgcgctggtactggtagcagcctcatcaggtccacctggccacctccggcagcgcatggcggcggccgcagcggcgagccgtcgtgggaggagctggccttcgcccaggacgcggcggggcaactcggcggctgcgtctggccgccgcgctcctacacgtgcaccttctgccgccgagagttccggtccgcgcaggcgctgggcggccatatgaacgtgcaccgccgcgaccgggctcgcctccggcagtgcgccccgccggatcatgaccaggagccgatcgccgcgcctcttccagcgccggaattggcggatcaccagcagcagcttctgcaactgcatggatctcccatgaccaaggcggcagtattattctctggccgccctgctgctgcttgctgtactcatcagcaaacttattgcaataacaacagggagggggagggggaggattctcctgctcggtacatatcaacgacgacgaccatcatcaaggagagcaagagcaaggtactcatctccatacctgcagcaacgacagcagcggggagcaaaaaagccgctactactatagcaatcatcggtgaggaggaggaggaggaagaagaagaggaagagatcatggtgacggggcggaggacgaaacgaaggcggctagtccatcagccgttctacgacctgcggcggcttccgccggcatcatcatcacccaataaaggaggagttgaagatgatgatgcaaaggtacccaaattaagcagccctataagcctcagtcatcatcttgcaggccggcaagaagaagtggatctggagctcaggcttggcactagctgctag

SEQ ID NO: 18 - DNA, 1548 bp, Zea mays
atggagctcgccggagcagcctcccctcacccgccgccggaatcccacgtggcgccgccccgcccacctccgcagccgccggaagaggatttatgtgaagatagaggggacatgagtgtcaccggcgaaaagccatgcacacatcgggaatcagatgttggtcagacaaatagttgtagccttaacaattccagtgagtgtgagaatcatacacccagcaacgacgaaatatcggaaccagagtccaatttggagatggccaagactgatcagggcggcgatgtgccgagcggagagaaggtcctgaagaagccagacaagatcctgccgtgccctcgctgcaacagcatggacacgaagttctgctactacaacaactacaacatcaagcagccaaggcatttctgcaagagctgtcagaggtactggaccgcaggcggaagcatgagaaacatccccgttggtgctgggaggcgcaagagcaagagctccagcgcgagttgccgcagcgtgttgattcccgttccaggcagcagtagtgtagctaatcctggcggagaggcttccctgtttccgttgtccgtaaaagcaaaccaagcagcagttagcttcgggcctgattcccccctctgcacctccatggcctccgtgctgaagatcggaggaggaggagagcaggttaagagctgcagccctgcctcagcagcagcacagcccaggaacggagaaacccagacccagacgtgcgcaccttcttctgctgctacaacaccatcagatggtccagggaatggattgcagaaaggagcagagagcgcacaccaaaaccaaaaccaaaaccaaaacggaatcattgggcacagcaacggagtcactccagtgcatcctataccgttcttccccggaccgcctttcgtgtacccctggagtccagcatggaacggcattcccgccatggcagcggcggtgtgcgcagccccagcgacagccgaagcagcgatttcatcagaacacggcaccgcgagcagcaccgtccagtggaacgtgccaccagcgatcgtgcccgtgctgccaccgggattctgcggcccgatcccagtcccggtaatcccgccgccttccgtctggccactgatcactccctggcccaacgcagcatggagcgcgccgtggctcgggcctagcgctagcgtgccgccggggtcatctcggagcagcggcagcagcacgtgctccgacagcggctgcggctccggctcccccgtcctgggaaagcactcgagggagtcgaggccgcagggcgacgagaaggcggaacgacggtgcctgtggatccccaagacgctccggatcgacgaccctgtcgaggccgccaagagctcgatctggacgacgctcgggatcgagcctggcgaccggggcatgttcaggccgttccagtcgaagcatggacggcagcaggagctgcaagcgtccggcgccgctcgcgccctgcaggccaacccggcggctctgtcgcgctcgcagtcttttcaggagacgacgtag

SEQ ID NO: 19 - DNA, 1349 bp, Zea mays
accaccaccaccccgctgcggcgatgtgcggcggcgccatcctctcgggtttcatcccgccgtccggggtggcggcggcggcggcggcggcggccaagaagaagcagcagcagcggtgccgtgtgactgcggacctgctatggccggggcccggcagtaagggagctccccaggacaaggaggaggacttcgaggccgacttccgcgagttcgagcgcggcctcggcgaggatgacgtggacagcgccggcgaaggcggcgaccccgaggtccaggagcttcctccgccggagccgacgaggtttgccttcgccaccgcggccaaggcagcagttgatggcgtgatgacgacgactccaaaggatgtgcaaggagatagagcagtaaaaaagcgcggccggaagaaccagtacaggggaatcaggcagcgcccttggggcaaatgggcagctgagatcagggaccccaacaagggcgtccgcgtctggctcggaacctacaacaccgccgaggaggcagctagggcatacgacgccgaagctcgcaagatccgcgggaagaaagcgaaggtgaatttccccgatgacgacgcgacaggcactcgtcacaggccaacgaacgccgcgaacgcagcgaggctagtagctccacccccacccccgaaggcctgcgccgatgagatgtttaacaacctgaagaacgacgacggcgacaacaacaacaacgatgatctgtttgcgatgtttgcgttcggtgacaataagaaggaggccgttcctgcagcgaagccagccgccgccgagggtggcagtggcagtggcagtggcagcttcctcgtccctgcgcctgcgatggcggcggcggtgcccggtaataagaggaggtcgtccgcgaccaacattatggtctccgtctccgacgaccagagcagcaactcctacggctccggctcctccgacttggtggggtcgtggtcgtgggacgacgccgccgccgccgccgccatgacctcggactacacctcctcggtcttcgctccggcgtcttactcttacatgcaaggcggagcgccgaagagaatgaggagcagctacggcggcgcgccgcccagcctcgcacatgacgcggccatgcctggctttggccttgataaagtgagctaccaccactaccaggcgttgcctccttattacgtcgggagcagcaacgcgtcggtgggcaacctcggtcttctgcagcaggctgatgatgctccagctccacaggatggggcgagcgccggggatatctggagcctcgacgagctgctcatgctggcagcagctggtgcttattgagaaccgcaatag

SEQ ID NO: 20 - DNA, 2553 bp, Zea mays
atgacttcttcggcggcggccgcggctgctgccgcccaggtggcgggaggaggtggaggcggcgagggagatgccgccgctgcggcgcgaggcggaggcggaacggaggacggcatgtacacggagctgtggaacctctgcgccggcccgctggtcacggtgcccagggtcggggacaaggtgtactacttcccgcagggccatatcgagcaggtggaggcgtcgaccaaccaggtggctgagcagcacatgcaattttacgatctcccgtggaagatcctgtgtgaggtcatgaacgttgaattgaaggctgagccagacaatgatgaggtttatgcccagctcactctgctacctgaatcaaagcagccagaggagaatggctctagtgaggagatgcctgcttcacctcctgctgcacttgcaaggccacgcgtgcactccttctgcaagacattgacagcctctgataccagcactcatggtggattctcggtgctgcggcgccatgcagatgagtgtcttccgccactggatatgacccgtcaacctccaacacaagagcttgtagccaaggacctgcatggtgtggaatggcgctttcgccacatattcagaggtcaaccacgaaggcatcttttgcagagtggctggagtgtttttgttagtgccaaacgtcttgttgctggcgatgccttcatctttctaagaggtgatagtggggagcttcgtgtaggagtcaggcgtgccatgaggcagcaagcaaatgttccgtcttcagtaatatcaagccacagcatgcatcttggtgttcttgctacagcatggcatgctgttaacactgggaccatgtttactgtctactacaagcctaggacaagtccagctgagtttgttgttccctgtgatcgctatatggaatcactgaaacgaaattaccctatagggatgagatttaaaatgaggtttgaaggtgaagaggctccagaacaaaggttcactgggaccattgttggaaatgtggatcctgatcaagctggatgggctgaatctaaatggcgttacctcaaggtgaggtgggatgaagcttcctccattccacgtcctgaaagggtttctccctggcaaatagaacctgcagtcagccctccccctatcaacccacttccagtgcacagacccaagagacctcgctctaatgctgtagcttctctgcccgagtcttcagctccaacaaaagaagctgctccaaaggtcacattagagactcaacaacatgccctgcaaaggcccttgcagacccaggataatgtggccccgaaaagtgtttttggtgataacagtgaattggactctgctcataagtcctccctgcgaccgtcaggttttgatctggacaagagcaccattggcatgcagaggaagctgggttcagatatttggatgcgaatgaacagacctgatggttacagtgaaatgttatcgggatatcaaccacctaatgaaggtgcacggaattcgcagggtttctgttctttacctgatcagattgccgctggacgtcctaatttctggcacactgtaaacgctcattaccaagaccagcaaggcaatcacaatctgttccctggttcatggtccatgatgccttcaagtactggctttgggatgaacagacagagctatccaatgatccaggaagtcggtgggatgtctcagagttgtacaaacaccaagtttgggaatggagtttatgctgcactacctggccgaggcattgatcgatacccatctggatggtttgggcacacgacacccggtggtcgcgtggacgatgcccagccacgcgtgattaagcctcaacctttggtccttgctcacggcgaagctctgaaaatgaagggcaactcgtgcaagctttttggaatccatctcgacagcccagccaaatctgaacctttgaagtctccgccaagcgttgccacaccggcagctgagaagtggatggcagacggaatcgacgcagacaaaagccctgagccgcacaagacgccaaagcaactcggtgctacacaggtggatcctgtcccagagagatgcccacaagcttcaaggggcacacagtgcaaatcacaaggcgggtcgactaggagctgcaagaaggtccacaagcaaggaatggcgctgggcaggtccgtggaccttaccaagttcaacggctacacggagctggtggcggagctggacgagatgttcgacttcaacggcgagctgaaaggctgtagcaaggagtggatggtcgtgtacaccgactacgaaggcgacatgatgctggtcggggacgacccctggaatgagttctgcagcatggtgcacaagatcttcgtgtacacgagggaggaggtccagcgcatgaacccgggcgccctgaactcgaggccggaggacagcggcctcgccaattcgacggagaggggctccgcatctactgctgctgctagagaggcacccggctaccagtccgcctcgtcgcttaactccgacaactgctag

SEQ ID NO: 21 - DNA, 2151 bp, Zea mays
atggcggcggctgcctgcgccggtgcggaagcaggacgcggatgcggagggaaggacgcgctgttcgtcgagctgtggaaggcctgcgcggggccgctgtcctgcgtgccgccgcttggggagaaggtctactacctcccgcagggccacatcgagcaggtggaggcatcgacgaaccagcttgccgagcagcagggcacgcccctctacaacctgccatggaagattccctgcaagctcatgaacatcgaactgaaggttgagccggatactgatgaggtgtacgcccagctcaccctgctccctgataagaagcaagatgagaatacatctacaacagtggaggaagaggaggtggtggtgcctcctgcgctaccagccacaaatgagggtcctcacatccattccttctgcaagacattgactgcctcagacacaagcacacatggtggtttctcagtgttgcgccggcatgcagatgagtgcctcccaccattggatatgagtcaacatcccccaaatcaagaattggtggccaaggacctgcatggggccgagtggcggttccgtcacatctttcgaggtcagccacggagacatctcctgcaaagtggttggagtgtttttgtgagcgccaagcgtcttgtcgcgggggatgccttcatatttctcagaggtgagaatggggagctccgtgttggagttcggcgtgcactgaggcaccaaaccactatcccatcttcagtcatatcaagccacaatatgcatcttggtgttcttgcaacagcatggcatgcagtgaacactgatagtatgttcactgtctactacaagccaaggactagtccagctgaatttgtggtttcgcgagataggtactatgaatcactgaaacgaaattattcaatagggatgagatttaagatgagatttgaaggtgaagaggcagcagagcaaagattcactggcacaatagttggaataggtgcttctgatccatctggttgggctgactcaaaatggcgttcccttaaggtgagatgggatgaaccttcttctatttctcgtcctgaaagagtttctccttggcaaatagaaccttctgttagcccatgtcatgtgaaccctcttccagttagattcaagaggtctcgatcaagcgttaatgctttgccatctgacgtgtctactgtaaccagagaagtcacttctaaagtcatggcagactcgcagcaaaatagtctcacaagagccttgcacaatcaaggaaggacacaattgacagttcgataccatgataacagtgatgtgaagactactcaggatcttaccgtgtggtcttcaggaactgagcaacagagaaacaatattgctgcccagacaaagctatgtctggagggttggacgccaactagaagtcctgaaggctacaatcagatattctcggcatttaaaccactgaaagatatacataacccacttggtccttttcctagtcaaatatctgggactcactcaaatagctgggacacagctgatgctcgttatccagtccaacaagctaattacagcatgttacctggcacatggtctttgaggcctcataacagtggttttaggatgaatcaacaaaattatctagtgatgcctgaaggtgcaaattttacggggaaatcagctttcacttcacttcaggaccatggcactgataaatgctccacaggctgctttggtcatattgagtcaagttcccacacagaccatgcatcctcaagtttgatcaggccccagcctttggtccttggaaatggtgttcagaaaagcaaaggcacttcatttaaattatttgggattccccttggcagcccagaaaaatctgaacctctggtatccccaccaagtgtcgcatatgacgggaaacttcaaacttctccatcagaaaaagggaatcagctagacgtagttgaagtggataattgttctcatccttctaagactgtgaagccacttgatggtcctcagtcagattctattacagagaataatcagccttctccagaagctacccttaatatccagaacaaagtgcaaagtagttccaccagaagctgcaagaaggttcatcatatgttgcacctttttccttgctag

SEQ ID NO: 22 - DNA, 900 bp, Glycine max
atggatcctggcagtggaggaaacagtcttggcaacaactctaatctcgcttcaaaacaacgtttacggtggacacatgaattacatgagcgctttgttgatgctgtggctcaacttggtgggccagatcgtgccacacccaaaggtgtcctcagagttatgggtgtacaaggcttgaccatttaccatgtcaaaagccatttacagaaataccgacttgcaaaatatttacctgactcctcatctgatgaagggaaaaaggctgacaagaaagaaacaggggatatgctttccaatcttgatggttcatctgggatgcagattactgaagcactaaagcttcaaatggaggttcagaagcgactacatgaacaattggaggtgcagagacagctacaattacggatagaggcccagggtaaatacctgaaaaagataatcgaagaacagcagcggctcagtggcgttctttcggagactcctggctctggggttgcagccgttgctccaggggatgcatgccaagaacctgataataagactgacccgtcaacccctgaccctgaaaaggccgccaaagaccgtgctccggcaaaaagtctttcaatagaatctttttcatctcaccttgaaccgatgacaccagattctggctgccatgttggttcccctgctgaaagccctaaaggggagagatcagccaagaagcaacgagtaatcatggatggcgtgtattctaaaccagaaatggtgcttccacatcagatactggagtcaagcatgtcattataccagcaacctaacactgtttttcttggccaagaccaatttgatccttctttgggtatatctaccagaagtggtgaggaattggataaggttggtggtggtaatctgtag

SEQ ID NO: 23 - DNA, 846 bp, Zea mays
atggacatggaccggccggaggaggaggggcagcagcggagggagacgatgacgccggtgctcctcaggctgttcggcgtggacgtccaccggggtggcggcagcggggagccggaggagtcgccgatggacctgaggaagagctccagcatgcccgacctcaccatcaacccgctgctgtcgccggaggagaaagagggctgcaaggggtacgcctccgacgacgcggagctggcgtccggccagcagaagcgccgccgtcgcaaggcacaggacaggaagaaaggaattccatggaccgaggaggagcacaggaagttcctggacgggctaaggcagctgggcaagggggactggaggggcatctccaagggcttcgtcaccaccaggacggcgacgcaggtggccagccacgcccagaagtacttcctccggcagaccaaccccggtatgaagaagcgccgggcgagcctcttcgacgtcggtatcgcggactacaaggacaaccaggtgccaggccctcagagcatcgtcgctgccaaaccggcgcctacgcaggagataatccacaccgaccgcggcgacgtccccataccaagatatagaggcctcggagagattttaggcagtaacatgcaggttaatcaactgactgactactactatttcaacaagaactcccatgttcccgcggggacttcgctctccatggcctccggcctggaaacggcctcgaccgtcgacagcctggagctcagcatcgccgtcaacggcctggagctcagcatcgcgcccccttcccggtgcgtctgcggcggcgcggcgggggccatcaaggttctgtag

SEQ ID NO: 24 - DNA, 1755 bp, Zea mays
atggccctgaccgacgccaccgcgttcccctacggcctgcgggtcctcgtcgtcgacgacgaccccacctggctcaagatcctcgagaagatgctccgcaagtgttcatacgaagtcaccacatgcggtttagccagtgttgctatccaaattctccgggagaggagaaacaagtttgacattgtaatcagtgatgtcaacatgcctgacatggatggtttcaagcttctcgaactcattgggcttgagatggatctacctgttataatgatgtccatagacggagagacaagtagggtgatgaaaggtgtccagcatggtgcatgtgactacctcctcaagcctgttcggatgaaggaactccgaaacatttggcaacatgtgtataggaaaaaaatgcatgaggtgaaagagattgaaggtaatgacagctatgatgatctccaaatgtttagaaatggtgtagagggattcgacgagagggacctatttatgagagctgactctgatactatgaggaagagaaaagacgtgaataaggaccatgcagatcaggactcaagtgatggagctactgttaagaaggctagagttgtctggtctgttgaccttcaccagaaatttgtaaatgctgtcaaccaaattggatttgacaaagtcgggccgaagaaaatactggatcttatgaatgttcctggcctgacaagagagaatgtggctagtcatcttcagaaataccgcctctacttgagtaggttgcaaaagcagaacgaggaaaggataatgggtgctgctaggcaagatttcaatcaaaagggaccatcagatcatcttaacctccgaagttccttccaagagcaaccaggcaacctttccaatggatgtcagcatagttctcagaaggtcgaagctcagaccagcattctcgatcctcatctggacgacacgaagacttcaatgcccttgaaggtgccagataaaaatggaatttcagcaagtgatgctgttgaccctcagaatatcaccactgcttcacctttaagtggggtgttctcttttgaaagaatgccagtgaatcaggacaggaagctatcagaaaccatgatcttggaatgtcagtcctggagtggaagtgtgccaccaaagcagttcatgcagtatccaaagcataaccatgagcgctgcgaccttctaggagactattcttgcctgcctaaaccggacttggagcacccaattgcccctggtcatctgtatgccccaccgccagtaatttcgatgagttacaatgtggaggaagatgtcagagacttctcagatgtaaaaccagatcttcttggctgtatgaagtccttatcaccagcactgacatgtacagttgagtcggtttctgctcaacttagtgacagtgttgtgacctcaactaacagtgaccggaagttttccagcgtggaggggttgtccagcattaaagattgtgactttgatcaggaaaggaacggagctattttgtttacttcagaagaggcaagtatattatgcggcactgattttacttgtctacctgaagacctgtccggctatcaacttcaaggtgtctccttcgggaataaaggattgaacagcatcgatttatatcagtgcaatgatacaatgttaatacctggactgcagaataattggtatgatgatgatgtagagtttagcagtgaaaccgtggagttcccattgctagacggaggcctgtttgcatag

SEQ ID NO: 25 - DNA, 615 bp, Triticum aestivum
atgaggtcgtccatttccactaagaggagccgggctgctgccatccataacgaatctgagcgtaaaagaagggacaggatcaaccagaagatgcagacattgcaaaagctcgtccccaactcaagcaagaccgacaaggcatcgatgctggacaaggtgatcgaccacttgaagcagctgcaggcaacggtgcagatgatgaaccggatgagcagcatgatgatgcccatggccatgccgcagctagcccagatgtccgtcatggccaacatggcccagatggcccagatggcgcagatgggcctgggaatgatgaacatggccgggccactcgcgcagcccgcctacccgggcctcacccagcccatgatgcaggcgtccacccctttcgtcgccatgcagccctggaacgccggcgccggcgccgaccggcagaagcagtccgccgccgtgccggacgcctactccgccttcctcgcctgccaagcggcgcagcagaacacgcagcagcaacagcaagctcaaccgaacggcatggaggcgtacagcaggatgatggccatgtaccagaagctaagccaacagcagacccagccaggcagctccaaagagtag

SEQ ID NO: 26 - DNA, 615 bp, Triticum aestivum
atgaggtcgtccatttccactaagaggagccgggctgctgccatccataacgaatctgagcgtaaaagaagggacaggatcaaccagaagatgcagacattgcaaaagctcgtccccaactcaagcaagaccgacaaggcatcgatgctggacgaggtgatcgaccacttgaagcagctgcaggcaacggtgcagatgatgaaccggatgagcagcatgatgatgcccatggccatgccgcagctagcccagatgtccgtcatggccaacatggcccagatggcccagatggcgcagatgggcctgggaatgatgaacatggccgggccactcgcgcagcccgcctacccgggcctcacccagcccatgatgcaggcgtccacccctttcgtcgccatgcagccctggaacgccggcgccggcgccgaccggcagaagcagtccgccgccgtgccggacgcctactccgccttcctcgcctgccaagcggcgcagcagaacacgcagcagcaacagcaagctcaaccgaacggcatggaggcgtacagcaggatgatggccatgtaccagaagctaagccaacagcagacccagccaggcagctccaaagagtag

SEQ ID NO: 27 - DNA, 831 bp, Zea mays
atggacgacggggacctggacttctccaacccggacacgtacctgtgcccggcgctcggcactgacccgcccagcagctgctccatggacagctacttcgacgagatcctcaaggacacggagcaccacgcctgcacgcacacccacacctgcaacccgccggtgcacgacctatcgcacacccacacctgcgtccacgtccacaccaagatcgtcgcggcctcgcccggcgacgacactgccgactcgccgtccgagaacaacaccaacggcagcggcggcaacggcagcaacgccgcctccaagaagcgcccctcggggaaccgcgccgccgtcaggaagtaccgggagaagaagaaggcccacaccgcgtcgctggaggaggaggtggtccatctcagggcgctcaaccagcagctcgtgaagaagctccagagccacgccgcgctcgaggcggaggtggccaggctccgctgcctgctcgtcgacatcaggggcaggatcgagggggagattggcgcgtttccgtaccagaggccgccgccagcggccaagaacgtcgacctcgtgtccggtgttgaccaaggagggttccttgccggggctgctgcccaggttaccagttcctgtgatttcagatgcaacgatcaaatgtactgcagccctggaatgcagggcgctgttggcggccaggtgttgggacaaggtgcctgtgatgtctcgagtatccaatgcgttggaagcaccaggtctgcgtccactaagctacctgtctgcggggggatggatgcagtacctgctgcctgcttgccaaatgttcaaaacaagtag

SEQ ID NO: 28 - DNA, 831 bp, Zea mays
atggacgacggggacctggacttctccaacccggacacgtacctgtgcccggcgctcggcactgacccgcccagcagctgctccatggacagctacttcgacgagatcctcaaggacacggagcaccacgcctgcacgcacacccacacctgcaacccgccggtgcacgacctatcgcacacccacacctgcgtccacgtccacaccaagatcgtcgcggcctcgcccggcgacgacactgccgactcgccgtccgagaacaacaccaacggcagcggcggcaacggcagcaacgccgcctccaagaagcgcccctcggggaaccgcgccgccgtcaggaagtaccgggagaagaagaaggcccacaccgcgtcgctggaggaggaggtggtccatctcagggcgctcaaccagcagctcgtgaagaagctccagagccacgccgcgctcgaggcggaggtggccaggctccgctgcctgctcgtcgacatcaggggcaggatcgagggggagattggcgcgtttccgtaccagaggccgccgccagcggccaagaacgtcgacctcgtgtccggtgttgaccaaggagggttccttgccggggctgctgcccaggttaccagttcctgtgatttcagatgcaacgatcaaatgtactgcagccctggaatgcagggcgctgttggcggccaggtgttgggacaaggtgcctgtgatgtctcgagtatccaatgcgttggaagcaccaggtctgcgtccactaagctacctgtctgcggggggatggatgcagcacctgctgcctgcttgccaaatgttcaaaacaagtag

SEQ ID NO: 29 - DNA, 915 bp, Glycine max
atgaatgttaaggtgcatagctctgatgataccaagaaggatgaagaggttgtgcttcctggctttagattccaccccacggatgaagagcttgttgggttttatctgcagagaaaggtggacaaaaagcctctaaaaattgaactcatcaaacaggttgatatctacaaatatgatccatgggatcttccaaaggtgaattcttttggggacaaagagtggtattttttctgcataagagggaggaagtacagaaacagcgtgaggccaaacagggtaactaggtcagggttctggaaggccacagggattgacaagtccatatattgcgtgaaagaaccccatgaatgcattggcctgaagaagtcattggtctattaccgtggaagtgctggcaaaggcaccaaaactgattggatgatgcatgagtttcgccttccacccaatgcaaaatccagccccaatgatgttcaagaagcagaggtgtggacactctgcaggatattcaaacgcatcccatctttcaagaagtacgctccaaacttgaaagactcaacaccagccaccaaaccaaaccctgtgaattccaacgcatccaccttagattctgacaattgctgcaagccatatttgatttgcagagaccctatgatgatgcaacaaatagaaagaaaaccagttattggacaagttgatgaaaagaaacacttgtttttgggccaatttggcccactatcccatcttcaggccccatcaaccaccccttacccaaatttttggaaccagaataatgttgaggaccacgcatttgccaatgagaattgggatgacctaagatctgtggttcagtttgcaatcgatccatccacggtgtttgattgtaccgaaacatatattccaccctacttttcttag

SEQ ID NO: 30 - DNA, 1845 bp, Glycine max
atgatgatgtttgaagatatgggattctgtggcgatttggatatgttatgtggttctcttggggatggggatattgctgtgagacaaactgaaccggatcctgtagttgaggatgactacagtgatgaagaaattgatgtggatgaactcgagaagaggatgtggagggacaaaatgcgtctcaagcgattgaaagaacaaaccaagtccaaggaagggactgatgcagcaaagcaaaggcaatcccaagagcaggcaaggaggaaaaagatgtcaagagcccaagatggaatactgaagtacatgctgaagatgatggaggtttgcaaggcacaagggtttgtttatgggataattcctgagaaggggaagccagtgaccggagcatcagataatcttcgcgaatggtggaaagataaggtcaggtttgatcgaaatggtcctgctgccatagccaagtatcaagccgataatgcaattcctggaaagaatgatggatgcaattccattggtcctacaccacacaccttgcaagagttacaggacacaaccttgggttctctcttgtcagcacttatgcagcactgtgatcctcctcagaggaggttcccactagagaagggtgttcctccaccatggtggccaactgggaatgaagaatggtggcctcaaattggtctacctaaagatcaaggccctccaccttacaagaaaccacatgacttaaagaaggcgtggaaggttggtgttctcactgcagtcatcaagcatatgtcccctgatatcgccaaaattcgcaagcttgtgaggcagtccaaatgccttcaagacaaaatgacagcaaaggaaagtgcaacctggcttgccatcatcaaccaagaggaagccttggctagagagctttaccctgattattgccctccgttttcctctgctgtagctaatggatccatggtgatcaacgattgcagtgagtatgatgttgatggggctgaagaagagccgaacttcgatgttgaggaccggaagcccgaccatcttcatccatcaaaccttgggatggagagaatgatgggaaggatgccaattcagcaaccttctcatcccatgaagggagatgttgtcacaaacctagatttcatccggaagaggaagatttctagtgacttcaacatgatgatggatcagaaaatctacacatgcgagcatccccaatgcccttacagcgaagttcgccttggtttccatgataggtctgctagggacaatcatcaattgaattgtgcatatagaaacagttctgcagattatggtggtggtcccaatttccatgctactgaggttaagccagtcatattcccccagtcctttgttcaacccaacactacagctcagtctgcaagtttggttgcaccttcatttgatctaactggtcttggagttcctgaggatggccagaaaatgattagtgaccttatgacaatctatgatacaaatgttgtaggaaacaaaaacctaagttccaccaactgtgtaactgctgaaaatcataacctttctcaggccagcttacaacgacaggacagttttttccctggtcaaggaatggtgttggaagggaacttgtttgcacgagaggaaggtcaatttgaccggttcaaggccaccatgaacatgaacatgaacatgaacactccttttgataccaaccacaacaacaataatatccatttgatgtttaattccccttgtgatttgtcatcctttgatttcaaggaggatatacaaggagtaggaatggattctcttcaaaaacagcaagaggtttcaatttggtaccagtag

SEQ ID NO: 31 - DNA, 846 bp, Arabidopsis thaliana
atggaccctccactagtgaacgattcctccttctctgcagctaatccttcttcttacactctctccgagatttggcctttccctgtaaacgacgccgttcgctctggtctccgtttagctgttaactccggtcgagtctttactcgctctgaacattccggcaataaagacgtctccgcggctgaggaatctacagtcaccgatctaactgctggctggggaagtagaaagactagagatttgaactctgaggatgattcttcaaagatggtttcttccagcagcagtggtaatgaattgaaagaatcaggggataagaaaagaaaactgtgtggatctgaaagtggaaatggagatggttcgatgagacctgaaggcgaaacaagttcgggtggtggtggaagcaaagcaacggaacagaagaacaaacctgagccaccaaaggattatattcatgtgagagcaagaagaggacaagctactgaccggcatagtttagcagagcgagctagaagagaaaagatcagtgagaagatgacagctcttcaagatataattccaggatgtaataagataatcggaaaagcccttgtgctcgatgagattatcaattatattcagtcattgcagcggcaagttgagtttctatcaatgaagctagaagttgttaactcgggtgcaagtactggtccgacaataggagtttttccttccggtgatctcgggactttaccgattgacgttcatcgaacaatatacgagcaacaagaagctaatgaaacccgagtatctcaaccggagtggctccatatgcaggttgatgggaactttaaccgaaccacatag

SEQ ID NO: 32 - DNA, 258 bp, Zea mays
atgtccgcctcacgcagctcctctcccaactccatctcacagtggagccagaaagagaacaagatgtttgaagaggcactcgcatactacggcgagggcacatccaaccggtgggacaaggtgtccagagccatgggaggcatcaagtctgctgaggaggtgcgctgccactatgaagatcttgactatgacgtcaagatgattgaatcaggccacgtgccgtaccccaagtacaagacacatggattctggacctag

SEQ ID NO: 33 - DNA, 615 bp, Lycopersicon esculentum
atggctagggcacaacaaagatatcgaggagttcgacagagacattggggttcttgggtctccgaaattcgccatccattgttgaagacaagaatttggttaggcacttttgagacagcagaagatgcagcaagagcatatgatgaagcagcaaggctaatgtgtggtccaagagctagaactaatttcccatacaacccaaacatgccacaaacatcttcctctaagctactctcaactacattaacagccaagttacacaaatgctacatggcttcacttcaaatgaccaaaacctcaccacaaggacaaaaattagcaaaaaatgcaaccaatgttcaagaaagtgttattaattcctataaaatgaaacaacaaatgttggtaccaaagccatcagtactattgactcatcatgatcatcatgaggaagctaaagtagtcaacttgggagtgggagtaattaggaaagttgaagatcaagtacttgagggtataccacaatttgtcaagccacttgaagatgatcacattgaacaaatgattgaagaattgttggattatggatccattgagctttgctctaatgttgttccttctcaccaaatccagtag

SEQ ID NO: 34 - DNA, 615 bp, Lycopersicon esculentum; identical to SEQ ID NO: 33

SEQ ID NO: 35 - DNA, 615 bp, Lycopersicon esculentum; identical to SEQ ID NO: 33

SEQ ID NO: 36 - DNA, 615 bp, Lycopersicon esculentum; identical to SEQ ID NO: 33

SEQ ID NO: 37 - DNA, 615 bp, Lycopersicon esculentum; identical to SEQ ID NO: 33

SEQ ID NO: 38 - DNA, 558 bp, Zea mays
atggaagatggcagtgctccaagacggtctactccacccacccgcagaagcagatctgctgagttccacaatttttcagaaaggaggagaagggataagatcaacgagaagctgaaagcattacaggagcttcttccaaactgcaacaagaccgacaaagtttcgatgctagacgaagcaatcgactacctaaaatcccttcagctccagcttcagatgctggtcatggggaagggaatgtcaccagtggttcctcttgagctgcagcaatacatgcattacatcacggctgaccctgcccagttgcctccgttgcgcccctccggccagcagcaccggcaatttcagataactcaagccaatccccagagacaatctaacgtcgagtcggatttcttgagccagatgcagaacttgcactcttctgagccgcctcagaactttctcaggccaccgaaattgcaactttatacaccggaacagaggggtggcctacccagcacgagccacaacactggatggatttctgggagttcctcgtataacttcatggagtag

SEQ ID NO: 39 - DNA, 1050 bp, Glycine max
atgagtggtgaagcgcgatcctgtgactactgtggccactccacagcacttctttactgcagagccgattcagcaaaactctgtttctcgtgcgatcgcgaggttcactccaccaaccagctcttctcgaaacacacgcgcacgctgctctgcgacgcatgcgatcattcccctgccaccatactctgttccaccgacacctctgttctgtgccagaactgcgactgggagaagcacaaccctgcgctctccgattcccttcacgaacgaaggcccctcgaaggcttcactgggtgcccttcagtctccgaactcttatccatcgtggggttttcggatttaagcaaaaaatctcttctttcttcgcctcagggaagtggcgctgatgggatcttcggtggagaaattgaagggctttcggatttgtttgtgtgggattctccttctttcgttacgcttgatgatttgatttcttcttctccttcttctcatagctttcaggccatggaggttcctcctctgcccaagaatcggaaggctgcttgtgggcaacacaaagaagagattcttagtcagcttcgggaattggccaagtctgagccattggaccttgaaccatatgtgtcatcggggaacttgtcctcgggttttgaacgtgaaccagaggctgatatctttccttctcatgagtggcatagagaaagcagcgagcctatgtatcaggttgttcctcctgacccattaatgagaacttatacagaagaaattccatttaaacattctacttctgctgttggggaaactcaaacctacggtgacaatggaggaaaaccatccatttctcttaaatctgaaaccctatcaactactcccaaagctgcagcatgtgagttaacaagccaagaaagagattctgcattattacggtacaagcagaagaagaaaactaggagatttgacaaacacataaggtatgaatcacgaaaagttcgggcagaaagcagggtaagagtcaagggtcgatttgccaagatggaacatgaacattag

SEQ ID NO: 40 - DNA, 558 bp, Zea mays; identical to SEQ ID NO: 38

SEQ ID NO: 41 - DNA, 558 bp, Zea mays; identical to SEQ ID NO: 38

SEQ ID NO: 42 - DNA, 1755 bp, Zea mays
atggccctgaccgacgccaccgcgttcccctacggcctgcgggtcctcgtcgtcgacgacgaccccacctggctcaagatcctcgagaagatgctccgcaagtgttcatacgaagtcaccacatgcggtttagccagtgttgctatccaaattctccgggagaggagaaacaagtttgacattgtaatcagtgatgtcaacatgcctgacatggatggtttcaagcttctcgaactcattgggcttgagatggatctacctgttataatgatgtccatagacggagagacaagtagggtgatgaaaggtgtccagcatggtgcatgtgactacctcctcaagcctgttcggatgaaggaactccgaaacatttggcaacatgtgtataggaaaaaaatgcatgaggtgaaagagattgaaggtaatgacagctatgatgatctccaaatgtttagaaatggtgtagagggattcgacgagagggacctatttatgagagctgactctgatactatgaggaagagaaaagacgtgaataaggaccatgcagatcaggactcaagtgatggagctactgttaagaaggctagagttgtctggtctgttgaccttcaccagaaatttgtaaatgctgtcaaccaaattggatttgacaaagtcgggccgaagaaaatactggatcttatgaatgttcctggcctgacaagagagaatgtggccagtcatcttcagaaataccgcctctacttgagtaggttgcaaaagcagaacgaggaaaggataatgggtgctgctaggcaagatttcaatcaaaagggaccatcagatcatcttaacctccgaagttccttccaagagcaaccaggcaacctttccaatggatgtcagcatagttctcagaaggtcgaagctcagaccaacattctcgatcctcatctggacgacacgaagacttcaatgcccttgaaggtgccagataaaaatggaatttcagcaagtgatgctgttgaccctcagaatatcaccactgcttcacctttaagtggggtgttctcttttgaaagaatgccagtgaatcaggacaggaagctatcagaaaccatgatcttggaatgtcagtcctggattggaagtgtgccaccaaagcagttcatgcagtatccaaagcataaccatgagcgctgcgaccttctaggagactattcttgcctgcctaaaccggacttggagcacccaattgcccctggtcatctgtatgccccaccgccagtaatttcgatgagttacaatgtggaggaagatgtcagagacttctcagatgtaaaaccagatcttcttggctgtatgaagtccttatcaccagcactgacatgtacagttgagtcggtttctgctcaacttagtgacagtgttgtgacctcaactaacagtgaccggaagttttccagcgtggaggggttgtccagcattaaagattgtgactttgatcaggaaaggaacggagctattttgtttacttcagaagaggcaagtatattatgcggcactgattttacttgtctacctgaagacctgtccggctatcaacttcaaggtgtctccttcgggaataaaggattgaacagcatcgatttatatcagtgcaatgatacaatgttaatacctggactgcagaataattggtatgatgatgatgtagagtttagcagtgaaaccgtggagttcccattgctagacggaggcctgtttgcatag

SEQ ID NO: 43 - DNA, 567 bp, Glycine max
atgcgttccagcaacggtgcatcaagcagcagagcctccaatgctaacactgggcgccaccctgtgtaccgtggagtgaggcgtaggagtagtggcaaatgggtttctgaaatccgtgaacccaaaaaacctaacaggatttggttagggacatttgccacccctgaaatggctgctattgcctatgacgtggcagcgcttgctcttaagggtaaggatgctgaactcaacttccctaactcggcttcctccctccccgtccccacatcatctgctgctcgcgacattcagatggctgcggctagcgccgcagccgctgtcggagctgcgaatgatgcacttgaaggaagccgaggagggaatgcttcggtttcattgacggaagagttttcagggggaaatttgaaccactttgtggatgaggacttgatctttgacatgccgaatattctggtcaatatggctgaaggaatgctactgagtcctcctcgttttgataattttgctgctaccgactatgaatacatggatgaagatcctaacctctgggggttccctaattactag

SEQ ID NO: 44 - DNA, 558 bp, Zea mays; identical to SEQ ID NO: 38

SEQ ID NO: 45 - DNA, 2157 bp, Zea mays
atggaggtgaattcctctggtgaggaaacggtgataaaggtaaggaagccatacacaataaccaagcagcgggagcggtggacagaggctgagcacaaacggttccttgaagccttgaaactttatggcagagcatggcagcgcatagaagagcatgttgggacaaagacggccgtgcagatcagaagtcacgctcaaaagttcttcaccaagttggaaaaggaagctattaacaatggtacttctccggggcaagcccatgacattgacataccgccaccacggcctaaaagaaaggctaacagtccatatcctcgaaaaagtggtctcagctctgagacaccaaccaaagaacttccaagtgacaagtcaacaaaaccaaatatgcccttgagcaatgagaatgtactaatggcaggtgatgcatctcttcagaaatttcaaaggaaggagttgtctggaaaagaaagttgctcggaagttcttaatctcttccgtgatgccccatctccatcattttcttcagttaacaaaagctcttcaaatcatggtgcaccgattgaggcaagtaaaacaaaaatccgagatatgaccattatggaaaatagttctcttaaccccaacatgcaagaggatgtaaaggaaatcaatgatcaggagatggaaaggcttaatggtacccaaatcagctctaaatgtgaacactctcatgagggatatttggacatctcaatgcaacaaatgaagctaaagccagagtctgtggagacaacatatgtggacaaacaaaccgcaagagcttcacactccctagcggagagaactgggacaactagcattccggtcactgcaactgaagaaactcattctgttctaacaagtgatcaagtgggaatcaatggaagcatgaacccatccatccatccaatgtttcctgcagatccaaaatttgatagcagtgccacaccacagccttttcctcataattatgctgcctttgctccaatgatgcagtgcaactgcaaccaagatacccacagatcattggtcaacatgtcatccaccttctccagcatgcttgtttccacgttgttgtcaaaccctgccatccatgcagctgccaggctcgcagcatcatactggccagcagctgaaggtaacactccgattgatccgaatcaagaaaatcttgcagatggtgttcaaggaaggagcatagggtctcctccaagcatggcttctattgtagcagctacagttgctgcagcatctgcatggtgggcaacacaaggtcttctccctttcttcgccccacccatggctttttcatttgtgccagctcccagtgctgccttccccacagttgatgttccacgaccttcagagaaagatagagattgcccagctgaaaatgcacagaaggaatgccaagaagctcgaaaacagggacagtttgaaggtttcagagttgccgcttcttcagagtatgatgggagtggaaaaggcgaggtgtctgtccacacagagttaaagatatctcctgtccagaatgctgatgccacgtctgccgcaggagctgacacgactgatgcattcatgaataagaaaaagcaggaccgctcttcatgcggttctaacacaccttcaagtagtgatgtagatgtggacaatgtccctgagaaagagggcaatggtaatgagaaggcgaagcaagcctcctgcagcaactcttcagctggtgacactaaccaccgcagatttagaagcagtggaagcacgagtgattcatggaaggaagtttccgaagagggtcgtctggctttccatgcgctgttcagtagagaaaagcttccgcaaagcttttctcccccacaagcagaaggctcgaaggaagttggcaaggaggaggaagatgaagtcaccacagtggcagttgacctcaacaagagtaccacaagcattgatcatgacctcgacacaattggtgagccaagggcttcctttcccaatgaactgtcgcccctgaagctgaaattgcgccgaacaggcttcaaaccatacaagagatgttctgtggaagcgaaggagaatagggtgccggctagcgacgaggttggtaccaagaggattcgtcttgatagtgaagcatcaacatag

SEQ ID NO: 46 - DNA, 1221 bp, Zea mays
atggttcctctctgtggtttctgtgggaaacaaaggtcaatgatctactgcagatcggatgcggcatcattgtgcttatcatgcgaccgtagcgttcattcagctaatgcactgtctcggcgtcatagaaggacccttctttgtgatcgttgtggtttacagcctgcatcagtccgatgtcttgaggacaacacatcactttgccaaaactgtgattggaatgggcatgatgcagcatcaggggcttctgggcataaaaggcaggccataaactgttactcagggtgcccatcatcagcagagctttcgagaatctggtcatttattatcgatatcccgactgtagctgctgagcccaactgtgaggatgggctaagcatgatgacaattgatgacagtgatgtgactaatcatcacggtgcttcagatgataaacgattgttggaaatagctaacacagcactcatgagtgatccaccttcacctgacaagcttaaacctctgataggctcttcttctggagatgggtttgatgttctgcctctagccacagatcagcctgctggaccagtttcagcgacacctaaggtaccttatgccagagatgacaataagttcaatgatggcatgtatgaagacttatgtgtggatgatgctgacctgacattcgagaattatgaagagctattcggtacctctcacattcgaatagaggaactctttgatgacgccggaattgacagttactttgaaatgaaggaaacaccgccttttgatttcaatgagcagcccaaaattgtgcagctacaatgtagcgatgtggtaccagctgattgtgcgatgtcaaacacaggggaaagggctgattccagcctttgtattcctgttaggcaggtcagatctagtatatcccatcccttatctggtttgactggtgagagcagcgctggagatcaccaagactgtggggtgtcaccaattctcctcatgggcgagccaccctggtattctcctggtccagaaggctcattagctggaggaagcagagatagtgctctcacacgatacaaggagaagaagaagaaaagaatgtttgacaagaagatcagatatgcttctcgcaaggctagggcagacgtgaggaagagggtcaagggacggtttataaaggctggcgaagcgtatgactatgatccactaagtcaaactagaagctactag

SEQ ID NO: 47 - DNA, 1290 bp, Glycine max
atgggaagacactcttgttgctacaaacagaagttacggaaaggcctttggtctccagaggaagacgagaagcttctcaatcacatcaccaaacatggtcatggatgttggagctcggttcccaaactagctggtttgcagagatgtgggaagagctgcaggttgaggtggataaattatctaaggcctgatttgaagagaggagcattctcacagcaagaagagaacatgattgttgaacttcatgcagttcttggaaacaggtggtctcagattgcagcacagttaccaggaagaacagacaatgagattaagaacctatggaactcgtgcctgaagaagaagctgaggcaaagaggcattgacccaaccacacacaagccactctctgaggttgagaacgacaaggacatgaatatgatgccaccctcaaccgacaaaagcactcagaaagcctctgtgggatccaatgaagtagtgagtaatttggttgatcatcatcagccaccaaaaaccatgcctaattcttcatcagagagataccctcttgaagtttccactactagttccacccaggaactgttcctagataggtttggcaccaccaccaccacctgccacgaaaacaacaacaacacttctgatttggtaggatcatacttctccttccagcacttgaactatggaacaacaacaagcatggccctctcttcaaaccccaacacctctctttgtttcattctaccctccacttcttcagacattaataataacaactccatcataacctcctcctccatgctcccttcaattttcccaacacaacatgtgaagctccaatctaataacaacaacccttcttccatttcatctgatggggttcaaaactgggaaacaagtaacaacacaaacaaaaacaatgggaatatgcagttacaaagtagcacaaactaccttgacagcacgtggggggtggcagagtctatgaagattgttaacattaacaaagaggctcaagtagtgcctctacaagcagaacaagaagatctaaaatggtctgagtatcttaacaccccgtttattctgggaaacaacacaacgcagaatcatcaaattcaaacctctcaatctatctacactgaggttattaaaccagaaacaggtttcataatagacgagtcatgtactagtaattggcaccatcatcagccaccaccagcttttcaactttccgatatatatagcaaggatctgcagagattttcagtgactttcggacaaaccctgtag

SEQ ID NO: 48 - DNA, 972 bp, Oryza sativa
atggggaggccgccgtgctgcgacaaggtcggggtgaagaaggggccgtggacgccggaggaggacctgatgctggtctcctacatccaggagcacggcgccggcaactggcgcgccgtgccgacgaacaccgggctgatgcgttgcagcaagagctgccggctccggtggacgaactacctcaggccggggatcaagcgggggaacttcaccgagcaggaggagaagctcatcgtccacctccaggctctcctcggcaaccggtgggcagcgatagcgtcgtacttgccggagaggacggacaacgacatcaagaactactggaacacgcacctcaagaagaagctcaagaagatgcaggccgccggaggtggggaagacagcggcgccgcctcggagggtggcggcggccgcggcgacggcgacggcggcgggaaaagcgtgaaggccgccgcacctaaggggcagtgggagcggcggctgcagacggacatccacacggcgcggcaggcgctgcgcgacgcgctctcgctcgaccaccccgacccgtcgccggcgacggcggcggcggcggcgacgccagcggggtcgtcggcggcgtacgcgtcgagcgcggacaacatcgcgcggctgctgcagggctggatgcgcccgggcggcggcggcggcggcaacggcaagggccccgaggcgtcggggtcgacctccacgacggcgacgacgcagcagcagccgcagtgctccggcgagggcgcggcatccgcgtccgcgtcggcgagccagagcggcgccgccgccgcggcgactgcccagacgccggagtgctcgacggagacgagcaagatggccaccggcggcggcgccggcggccccgcgccggcgttctcgatgctggagagctggctgctcgacgacggcggcatggggctcatggacgtggtgccattgggggaccccagtgagttcttttag

SEQ ID NO: 49 - DNA, 972 bp, Oryza sativa; identical to SEQ ID NO: 48

SEQ ID NO: 50 - DNA, 207 bp, Zea mays
atggagacggtgcaggagtgcgtgtccgagttcatctccttcatcaccggcgaggcctccgacaagtgccagcgcgagaagcgcaagaccatcaacggcgacgacctgctgtgggccatgaccacgctcggcttcgaggactacgtcgagccgctcaagcactacctgcacaagttccgcgagatcgagggcgagagggccgcctag

SEQ ID NO: 51 - DNA, 558 bp, Arabidopsis thaliana
atggagagggagagagcattgtttgagagggtgagaaagaatagcacagtggaagaggaagtggaaaatgaagtagaggaggaggatgaaagtggcgttagtattactgaagaagagaagaagaaaggggttggtagtagtggtgggagaagagggtcaagtggaggtagtggaggggtttctccaccttcatgtcaagcagagaggtgtggtgctgatttaactgatgcaaagaggtaccatcgccgccacaaggtgtgtgagtttcattcaaaggcacctgttgtggtggttgcagggctaaggcagaggttttgccagcaatgtagcaggttccatgacctggcagagtttgatgaatccaagagaagctgccgccgccggttggccggacacaacgagcggcgccggaaaagcaacccggaagcttccaatgagggcagcaccaaaggccatcaccctaaggaaacaacacactgcaggcttgcaaatgagagggagagaattcagatgaacctaccagggagttccggctacaagtctttcaacatcagatag

SEQ ID NO: 52 - DNA, 972 bp, Oryza sativa
atggggaggccgccgtgctgcgacaaggtcggggtgaagaaggggccgtggacgccggaggaggacctgatgctggtctcctacatccaggagcacggcgccggcaactggcgcgccgtgccgacgaacaccgggctgatgcgttgcagcaagagctgccggctccggtggacgaactacctcaggccggggatcaagcgggggaacttcaccgagcaggaggagaagctcatcgtccacctccaggctctcctcggcaaccggtgggcagcgatagcgtcgtatttgccggagaggacggacaacgacatcaagaactactggaacacgcacctcaagaagaagctcaagaagatgcaggccgccggaggtggggaagacagcggcgccgcctcggagggtggcggcggccgcggcgacggcgacggcggcgggaaaagcgtgaaggccgccgcacctaaggggcagtgggagcggcggctgcagacggacatccacacggcgcggcaggcgctgcgcgacgcgctctcgctcgaccaccccgacccgtcgccggcgacggcggcggcggcggcgacgccagcggggtcgtcggcggcgtacgcgtcgagcgcggacaacatcgcgcggctgctgcagggctggatgcgcccgggcggcggcggcggcggcaacggcaagggccccgaggcgtcggggtcgacctccacgacggcgacgacgcagcagcagccgcagtgctccggcgagggcgcggcatccgcgtccgcgtcggcgagccagagcggcgccgccgccgcggcgactgcccagacgccggagtgctcgacggagacgagcaagatggccaccggcggcggcgccggcggccccgcgccggcgttctcgatgctggagagctggctgctcgacgacggcggcatggggctcatggacgtggtgccattgggggaccccagtgagttcttttag

SEQ ID NO: 53 - DNA, 2526 bp, Arabidopsis thaliana
atggaacttgacgacttggatctcagcggttcttggccgttagatcagatcacttttgcttcaaatttcaagtctcctgtcattttctcttcctccgaacaacctttctctcctctctggtccttctccgaaacttctggagatgtcggcggcgagctttactccgccgcagtagctcccactcgcttcaccgattattccgtcttactcgctagttctgaatctgaaaccacgaccaaggagaataatcaggttccttctccgtcatggggtataatgcctttggagaatccagatagttactgtgccatcaaagccaagatgactcaagcgcttagatacttcaaggaatctactggacaacaacatgttcttgctcaggtttgggcgcctgtcaaaaaccgtggtcgatatgttcttacaacttcaggacagccatttgttcttggtcccaatagtaatggccttaatcaatacaggatggtttcattgacgtatatgttttcccttgatggtgaacgggacggagagctcgggcttcctggtcgcgttttcaggaaaaagttacctgagtggactcctaatgtgcagtattactccagcaaagagttttcaaggcttggtcacgccttgcactataatgttcagggaactttggctttgcctgtttttgaaccatccaggcaactctgtgtaggagttgtcgagcttattatgacttctccgaagattaactatgctcctgaggttgaaaaagtttgtaaagcgcttgaggccgtgaatctgaagacttcggaaatattgaaccacgagactactcagatctgcaacgagggtcgccaaaatgcgttagctgagattttggagatactgacagtggtgtgcgagacctacaaactgcctttagcccagacatgggtcccttgcaggcatcgcagtgttctagcctttggaggtggttttaagaaaagctgttcgagcttcgatggaagctgtatggggaaagtctgtatgtctactagtgatttagcggtttatgttgttgatgctcatgtttggggtttccgagacgcctgtgctgaacaccatctgcagaagggacaaggtgttgctgggagggcgtttcagtctggaaatctatgcttctgtagagatgttactcggttctgcaaaaccgactacccattagtacactatgcacggatgttcaagttgacgagctgtttcgcggtctgcttaaagagcacatatacaggggatgatgagtacgttcttgaattctttcttcctccagccatcacagacaagagtgagcaagattgtctattgggttctctgcttcagacaatgaagcagcactattcgagtctcaaggttgtctctgaaactgaactctgtgaaaacaacatgtctcttgaagtcgtggaagcttcggaggacggaatggtttactcgaaacttgaaccaatcaggatacatcatccagcacaaatctctaaggattaccttgagctcaacgcacccgaacagaaggtgagcttaaactctgactttatggagaataatgaagttgatgatggggttgagaggttccaaacgcttgatcctataccagaggccaaaacagtgaaaaaatcagaaaggaagcgtgggaaaacagagaaaacgatcagtctagaagtgcttcaacaatattttgctggtagtctaaaagatgcagcaaagagcctcggagtttgcccaacaacaatgaaacgcatttgccgacaacacgggatctcacggtggccatctcgaaaaatcaacaaggtgaaccgatctctcacacgacttaaacatgttatagactcggttcaaggtgctgatggatcactcaacttgacgtccctctctcctcgcccttggcctcaccaaatccctccaatcgatatccaattagcaaagaactgccctccaacttctacatctcccctaagtaatctccaagatgtcaaaatcgaaaacagagatgcagaagacagtgcaggttcatcaacatcgcgtgcttcttgcaaagtgaatcctatttgcgagacgcgttttcggcttcctacacacaaccaagaaccatccagacaagtggccttggacgattcggatagtagctctaaaaacatgacaaatttttgggcacacttaacctgccaagatacagcttctccaacaattctccaacataagctcgtgagtataaaggcaacgtacagagaagacatcatcaggttcaagatctcaccagagtcggtaagcattacggaacttaagcagcaagtggccaaaaggctgaagctcgaaacggcagcctttgagctcaagtatctagacgacgatagagaatgggtctccgtctcatgcgatgctgacctcagcgaatgcctcgacacgtctgcagcaaaagcgaacacactgaggctctcagtacatgacgtgacttttaactttgggagctcatgcgaaagctcagaggaaactatgatgtgcttgtag

SEQ ID NO: 54 - DNA, 1275 bp, Glycine max
atgtccttccgcagtattgttcgtgatgtaagggatgggtttggaagcttatcaaggaggagttttgatgtaaggatttctggtgggggcaagttgaatagtttggtccatgaggcgcatgaacgccagctagttatacagaacagcaggtgggctagccttccgcctgagcttctttgtgatgttattaaaagattggaagaaagtgagagtacatggcctgctcgtaagcatgtggttgcatgtgctgctgtgtgcaagtcctggagagaaatgtgcaaagaaattgttaccagtcctgagttctgtgggaagattactttccctgtctccctgaagcagcctggttcaagggatggaaccatccagtgtttcatcaagagagacaaatctaatctgacataccacctattcctttgtcttagtcctgcattgctagttgaaaatggaaagtttcttctttctgcaaaacggaccagaagaactacatgcacagagtatattatatcaatggatgcagataacatatcaagatctaatagcacttacattggaaaactgaggtcaaattttcttggcaccaagtttataatttatgatacacagcctccctataacaatgctcagctgtctcctccaggccgaagccgtaggttttattcaaaaaaagtttctccaaaggtccctagtggcagctacaatattgcccagatcacctatgagttgaatgtccttggtactaggggcccgcgcagaatgaactgcaccatgcactcgatccctatgtcagcccttgagcctggttgcactgtcccgggccagccagagctccttccccgctccctcgaagattccttccggagcatatcctttgctagatcgattgacaactcaaccgagttcagcagctccaggttctcggacatatttgtggcgggcaacgaagaggagcagggaaagggtaggcctttagttctcaagaacaaatctccaagatggcatgagcagctgcagtgttggtgcctgaactttagaggaagggtgactgttgcctccgtcaagaatttccagctgattgctgcgacgcagccacctgcagccggtgctcctacaccgtcatcgcagccagcgcagtctgatcatgacaagattattcttcagtttggcaaggttggcaaggatatatttactatggactatagatatcccctatctgcatttcaggcttttgccatttgcttgactagttttgacacaaaactagcttgtgaatag

SEQ ID NO: 55 - DNA, 615 bp, Triticum aestivum
atgaggtcgtccatttccactaagaggagccgggctgctgccatccataacgaatctgagcgtaaaagaagggacaggatcaaccagaagatgcagacattgcaaaagctcgtccccaactcaagcaagaccgacaaggcatcgatgctggacaaggtgatcgaccacttgaagcagctgcaggcaacggtgcagatgatgaaccggatgagcagcatgatgatgcccatggccatgccgcagctagcccagatgtccgtcatggccaacatggcccagatggcccagatggcgcagatgggcctgggaatgatgaacatggccgggccactcgcgcagcccgcctacccgggcctcacccagcccatgatgcaggcgtccacccctttcgtcgccatgcagccctggaacgccggcgccggcgccgaccggcagaagcagtccgccgccgtgccggacgcctactccgccttcctcgcctgccaagcggcgcagcagaacacgcagcagcaacagcaagctcaaccgaacggcatggaggcgtacagcaggatgatggccatgtaccagaagctaagccaacagcagacccggccaggcagctccaaagagtag

SEQ ID NO: 56 - DNA, 1368 bp, Glycine max
atgtctaatttgacttctgcatccggtgaagctagtgcatcttcaggcaacagaaccgaaattggcactgattactcacaacaatactttgctccaccactaagtcaagcacagcctcctccactaaagaaaaagagaaaccttcctggcaacccagacccggaagctgaagttgtcgccttgtctccaaagactctcttggcaactaataggttcatttgtgagatctgcaacaagggatttcaaagagaccagaatctccaacttcacagaagagggcacaatttaccatggaagctgaagcagagatcaagcaacgagattataaggaagaaggtgtatgtgtgcccagaagccagttgcgtgcaccacgacccttcaagggctcttggggacctcactggcatcaagaagcacttctgcagaaagcacggcgagaagaagtggaaatgtgacaaatgctccaagaagtatgctgttcaatcagattggaaagctcactccaagacctgtggcactagagagtacagatgtgactgtggaaccctcttctcaaggagggacagtttcataacacacagagccttctgtgatgcattagcagaggagagttcaagatcagtgacaggcataggcatagtagccaactcaacttcaactcaaccaactgcagcagcagcctctcatcaacaagacatcatccatggtaatagtaacaatttctcattgaagaaagagcaacaagcaggtttcagaccaccttggattggacaaccatcaccctcttctgcttcatcattcttggtctctcatcaagaaaaccctaaccctagaggtggtggtcctggtcccactcttcttcctccttaccaaacagctcctcacatgtcagccacagcgttgctgcagaaagcatcccaaatgggtgcgacgatgagcaaaaccgggtccatgattgggacccaccaacaacaggctcacgtgtctgccaatgccgctttgaatttgtcctcacgtgaccaccagatgacccccactctccatggcttggtacctttcgggaataaagctgttcctgctgttggtaatggtgtttctccttcactccttcaccatatcatcgactctttctcttcaccctttgaagggacttcttttgaggacacttttggtggtgctggtggcgatgccatgacgaaaacaaccaccgccgatgacggtgccagaggaaacaataatgaagccctgacaagagatttcttgggtcttagacctctctctcacactgatatcctcaacattgctggtatgggaagttgcatcaactcctcccaacataaccaaaccccaaacccttggcaaggttag

SEQ ID NO: 57 - DNA, 723 bp, Zea mays; identical to SEQ ID NO: 12

SEQ ID NO: 58 - DNA, 609 bp, Glycine max
atggccagaccacaacagcgttaccgaggtgtccgacaaaggcattggggctcttgggtctccgaaattcgccaccccatattgaagactaggatatggcttggtacatttgaaacagctgaggatgctgctagggcctatgatgaagcagctaggctaatgtgtggtgcaagggcaagaacaaacttccctttcaatccaaatgtgtcacactcatcatcttctagttcaaagcttctctcagcaactttgactgcaaaacttcacaggtgctacatggcttctttgcaagtgacaagacaagctttggcatctgagtctcagagaacaccaccctcagtgcaaaatgcaacaacctccacaaccacaccaattagcaacaacttcagtgtgaagagtgagcaaactcatgcagtgttgccacataagagaccagaggaggagcaagagtcagaggcaaataggggtgtgaaaagggttaaggctgtggaaaatgttcctctgcaattcaagcctcttgaggaagatcacatagagcaaatgattgaggagcttcttgattatggatctattgaactctgctctgtcatttcaccccaggccctctag

SEQ ID NO: 59 - DNA, 810 bp, Arabidopsis thaliana
atggctatggaatgggataatcagctacaacccaataaccatcactcttctaatcttcaagggatcgacgttaatggcggctccggcgccggaggaggaatgtacgtgaaggtgatgaccgatgagcagtatgaaactctcaggaaacagattgctatttacggcaccatttgtgagcgtcttgttgagatgcataaaactctcactgctcaacaagatcttgcaggagggagaatgggaggactatatgcagacccaatgatgtcatctttaggtcataagatgacagctagacagaggtggactcctacgccagtccagcttcagattctggaacgtatattcgatcaaggcacgggaacaccgagcaagcagaagatcaaagacataacagaagagctgagccaacacggccagattgctgaacaaaatgtctataactggttccagaaccgacgtgctcgatccaagaggaagcagcatggtggaggttcttctggaaataataatggtgagtctgaggtagagactgaagttgaagcattgaatgagaagagagtagtgaggccagagagtcttcttggtcttccagatggaaatagcaacaataatgggttagggacaacaacagcaacaactactgctcctaggcctgaagatctttgctttcagagccctgagattagctcagaccttcacttgctagatgttctatcaaacccaagggatgagcatcttgttggaaagatgggactggcggaaagttacaacctttatgatcatgttgaagattatggcatgtcaggctag

SEQ ID NO: 60 - DNA, 1518 bp, Glycine max
atggcttcatcttcctccaacggcagttccagcggaagcaagagttgggacatcgacggcgacctcgccggtttcggctacaaagtccgttcatcggagctgcaacacgtggcagaaaacatggagcgtttagagaacgtgatggacattgtgaactcatcaaccaacaataacatatctcagctggcctccgatacagtcttctacaacccctccgacataggttcctgggtcgacacgcttctctccgagttcgaccaaacggcgtcgttgccctacgatttctcggattttctcgatctcgacacggatcagaatcaaaaccacaaaccaacgctggtaacaatggaagaagactcagggataagactcgtccacacgctgatgacctgtgcggattccgtgcaacgtggtgacctcgcattcgcgggctccctcatcgagaacatgcaggggctgttggctcacgtgaacaccaacatcggaatcggtaaagtcgctggatatttcatcgatgccttgcgccgtcgcatcttagggcaaggcgtgtttcaaacgttgtcgtcgtcctcgtatccgtacgaggacaacgtactctaccaccactactacgaggcctgcccttacttgaagttcgcgcacttcacggcgaatcaggctattttagaagctttcaacggtcatgattgtgtccacgtgattgacttcaatctcatgcaggggctccagtggcccgcgctgattcaggccctggcgcttcggcccggtgggcctccgttgttgaggctcacgggcattgggcctccctcatctgacaaccgcgacacgctccgcgaaatcgggctcaggctcgctgagctggcgcggtcggttaatgttagatttgcatttcgtggcgtggcggcgtggcggctcgaagacgtgaagccgtggatgctgcaggtgaatccgaacgaagccgtggcggttaactccatcatgcagttgcatcggcttcttgcttcggactccgatccaataggttcgggcatcgaaaccgtgctgggttggatccgaagcttgaacccgaagattatttccgttgtagaacaggaagcgaaccacaaccaggaccggttcttggagcggttcacggaagcgttgcattactactcgaccgttttcgactcgctggaggcgtgtccggtcgaaccggacaaggcacttgcggagatgtacctgcaaagggagatatgcaacgtggtgagcagcgagggaccggcgcgagtcgagaggcacgagccgctggctaagtggagggagcggctcgagaaagccggcttcaagccgctgcatttggggtcaaacgcgtacaagcaagccagcatgttgctgactcttttctctgctgaagggtactccgtggaagagaatcaaggatgcttgactttggggtggcatagccgccctctcattgcggcttcggcttggcaagctgcgccgatgcaggacagggaaacgctgcgtttcgagcaatag

SEQ ID NO: 61 - DNA, 939 bp, Arabidopsis thaliana
atggagagtgttgaattgacgttgaagaacagtaacatgaaagacaaaaccctaaccggcggcgctcaaaatggcgatgatttctccgtcgacgacttgcttgacttctcaaaagaagaagaagacgacgacgttttggttgaggatgaggctgaattgaaagtacaacgaaaaagaggagtctctgacgaaaatacccttcaccggagcaacgatttctccaccgctgatttccacactagcgggctttccgttccgatggatgatatagcggaacttgaatggttatcaaatttcgtagatgattcttctttcacgccgtattctgctccgacgaataaaccggtttggttaaccggaaatcggagacatcttgtacaaccggttaaagaggagacctgcttcaaatcccaacatccggccgtcaaaaccagacccaaacgagccagaaccggagtcagagtctggtctcatggttcgcagtcgttaaccgactcatcttcaagctctacaacatcttcgtcgtcctctcctcgtccttcaagccctctatggctcgccagcggtcagtttcttgatgagccaatgactaaaacacaaaagaagaagaaagtttggaaaaacgctggtcagacgcaaacgcaaacgcagacgcagacgcggcagtgtggtcattgtggagttcagaaaacgccgcagtggagagcaggaccattaggagcgaagacgttgtgtaatgcgtgtggtgtgcgttacaaatcgggtcggttactacccgaatatagacccgcttgtagcccaacattttcgagtgagcttcactcaaaccaccacagtaaagtcattgagatgcgtaggaagaaagagacttctgacggtgctgaagaaaccggtttgaaccagccggttcagacggttcaggttgtctcgagtttttag

SEQ ID NO: 62 - DNA, 2013 bp, Zea mays
atgcttctgggcgctgcggccgcgaggatggaggagaagcgcgtgatcacggggagggagcgggaccagttccccgtcgggatgcgggtcctcgcggtcgacgacgaccccgtctgcctcaaggttctcgagaccctgctgcggcgctgccagtatcatgtaataacgaccaaccaggccatcaccgcgctgaagctgctaagggagaacagggacatgttcgatctggtcatcagcgacgtgcacatgcccgacatggacggattcaagctccttgagcttgtagggcttgagatggacctacctgtcatcatgttgtcagtgaacggggagaccaaatccgtgatgaaggggataacccatggcgcctgcgactatctcctgaaacccgtccgcatcgaagagctaaggaacatatggcagcacgtcgtcaggaggaagttcagcaagcgagagcgcagcaaccttgacgtctacaaagatttcaacaggctgccaggcgcggatccatgccacagccacggccacggccacggccagaccactgccggggcttccgaccagagcgggaggatcggcaggaagaggaaggaaatgcacagcgacgaggaggacgacggcgaggagaacgatttccaggagggcgacgagccctccgcggctaagaagccgagagtcgtctggtcgattgagctgcaccggaaattcgtcgcggccgtcaaccagcttgggattgataaagctgttccgaaaaggattcttgagcttatgaatgtggagaaactcaccagggaaaatgtcgcgagccatctacagaaatacaggctctatctgaaacggttaagtgctgtggcgtcacagcaagctagcattgtcgccgcatttggaggtagagacccctttctccacatgggagcctttgaaggccttcagagctaccaacctttcgccccctgtgctgctctatcgtccttcatcccacaccacggctcgcttggtagaactaccgcggcagcattcggggtcccggagcttgctcctgccatcacagttcaagctgctgccagcaatggcatgataagccactgtgctggcgacgcaagcaagtttcagctctccggtatacaagaaaaccagcaaccaaatctgggacaaggctcagccacctctcttgggctgccccagctccaacagaagtggatccagcaagaaactggcgacttgtctactgtcttctctgggagtgcactggctaacactctgtctggtgcactccagagagttgcaagcagtccattgccaccgcaagaacttttggagggcgtacaaaccaaagttagtgcccagccaccaataacaatggcatctgtgagttcagaacttgttgagaggactgttggagtttcggctaatttgcaggactccggtatatccccgcagggcactcttccaataaatgatggatttactgctgacaagttacagctgcaagatccattcgatagcaatggtggaacaaatttttcggtaaacatgcctgtttgtccttctggtagccttgcagcatccagcaacgccaagggtggtgctagttcgtgcagtccagtgctgctcgctcctgataatgggagacattcaaactacttgcagtttggagttgcaggcaactctggacatgacatgaacgatattaaacaggaccatctgcatcaaggattgagcactggaggtttcaatcacgattttggcacctgtatgactgaacagacagatccaaatgtgccgtatcttatgccacaaattaagcctaacaccatagcatcagaggataaactgaagcagaggaatatttatgatttggggattccaaagctccatggtggttttagctctagtagctgcaattttgatggtcttctcaattccatggtcaaagcggaaaaggatgatctctcattcacggatagcgacctggggtgcgacttctttccactcggtgcttgcatatgatag

SEQ ID NO: 63 - DNA, 672 bp, Zea mays
atggcggactccgacaacgactccggcgggccgagcaacgccgggggcgagctgtcgtcgccgcgggagcaggaccggttcctgcccatcgccaacgtgagccggatcatgaagaaggcgctcccggccaacgccaagatcagcaaggacgccaaggagacggtgcaggagtgcgtgtccgagttcatctccttcatcaccggcgaggcctccgacaagtgccagcgcgagaagcgcaagaccatcaacggcgacgacctgctgtgggccatgaccacgctcggcttcgaggactacgtcgagccgctcaagcactacctgcacaagttccgcgagatcgagggcgagagggccgccgcgtccgccggcgcctcgggctcgcagcagcagcagcagcagggcgagctgcccagaggcgccgccaatgccgccgggtacgccgggtacggcgcgcctggctccggcggcatgatgatgatgatgatggggcagcccatgtacggcggctcgcagccgcagcaacagccgccgcagcctcagccgccacagcagcatcagcagcaacatcaacagcatcacatggcaatgggaggcagaggaggattcggccaacaaggcggcggcggtggctcctcgtcgtcgtcagggcttggccggcaagacagggcgtag

SEQ ID NO: 64 - DNA, 1644 bp, Arabidopsis thaliana; identical to SEQ ID NO: 16

SEQ ID NO: 65 - DNA, 558 bp, Zea mays
atggcggaagctccggcgagccctggcggcggcggcgggagccacgagagcgggagccccaggggaggcggaggcggtggcagcgtcagggagcaggacaggttcctgcccatcgccaacatcagtcgcatcatgaagaaggccatcccggctaacgggaagaccatcccggctaacgggaagatcgccaaggacgctaaggagaccgtgcaggagtgcgtctccaggttcatctccttcatcactagggaagcgagtgacaagtgccagagggagaagcggaagaccatcaatggcgacgatctgctgtgggccatggccacgctggggtttgaagactacattgaacccctcaaggtgtacctgcagaagtacagagagatggagggtgatagcaagttaactgcaaaatctagcgatggctcaattaaaaaggatgcccttggtcatgtgggagcaagtagctcagctgcacaagggatgggccaacagggagcatacaaccaaggaatgggttatatgcaaccccagtaccataacggggatatctcaaactag

SEQ ID NO: 66 - DNA, 558 bp, Zea mays
atggcggaagctccggcgagccctggcggcggcggcgggagccacgagagcgggagccccaggggaggcggaggcggtggcagcgtcagggagcaggacaggttcctgcccatcgccaacatcagtcgcatcatgaagaaggccaggccggctaacgggaagaccatcccggctaacgggaagatcgccaaggacgctaaggagaccgtgcaggagtccgtctccgagttcatctccttcatcactagcgaagcgagtgacaagtcccagagggagaagcggaagaccatcaatggcgacgatctgctgtgggctatggccacgctggggtttgaagactacattgaacccctcaaggtgtacctgcagaagtacagagagatggagggtgatagcaagttaactgcaaaatctagcgatggctcaattaaaaaggatgcccttggtcatgtgggagcaagtagctcagctgcacaagggatgggccaacagggagcatacaaccaaggaatgggttatatgcaaccccagtaccataacggggatatctcaaactag

SEQ ID NO: 67 - DNA, 558 bp, Zea mays
atggcggaagctccggcgagccctggcggcggcggcgggagccacgagagcgggagccccaggggaggcggaggcggtggcagcgtcagggagcaggacaggttcctgcccatcgccaacatcagtcgcatcatgaagaaggccatcccggctaacgggaagaccatcccggctaacgggaagatcgccaaggacgctaaggagaccgtgcaggagtccgtctccgagttcatctccttcatcactagcgaagcgagtgacaagtcccagagggagaagcggaagaccatcaatggcgacgataggctgtgggctatggccacgctggggtttgaagactacattgaacccctcaaggtgtacctgcagaagtacagagagatggagggtgatagcaagttaactgcaaaatctagcgatggctcaattaaaaaggatgcccttggtcatgtgggagcaagtagctcagctgcacaagggatgggccaacagggagcatacaaccaaggaatgggttatatgcaaccccagtaccataacggggatatctcaaactag

SEQ ID NO: 68 - DNA, 735 bp, Triticum aestivum
atggggcgcgggaaggtgcagctgaagcggatcgagaacaagatcaaccggcaggtgaccttctccaagcgccgctcggggctgctcaagaaggcgcacgagatctccgtgctctgcgacgccgaggtcggcctcatcatcttctccaccaagggaaagctctacgagttctccaccgagtcatgtatggacaaaattcttgaacggtatgagcgctactcttatgcagaaaaggttctcgtttcaagtgaatctgaaattcagggaaactggtgtcacgaatataggaaactgaaggcgaaggttgagacaatacagaaatgtcaaaagcatctgatgggagaggatcttgaatctttgaatctcaaggagttgcagcaactggagcagcagctggaaagctcactgaaacatatcagatccaggaagaaccaacttatgcacgaatccatttctgagcttcagaagaaggagaggtcactgcaggaggagaataaagttctccagaaggaactcgtcgagaagcagaaggcccaggcggcgcaacaagatcagactcagcctcaaacaagctcttcttcttcttccttcatgatgagggatgctccccctgccgcagctaccagcattcatccagcggcggcaggcgagagggcaggggatgcggcagtgcagccgcaggccccaccccggacggggcttccactgtggatggtaagccacatcaacggctag

SEQ ID NO: 69 - DNA, 558 bp, Zea mays
atggcggaagctccggcgagccctggcggcggcggcgggagccacgagagcgggagccccaggggaggcggaggcggtggcagcgtcagggagcaggacaggttcctgcccatcgccaacatcagtcgcatcatgaagaaggccatcccggctaacgggaagaccatcccggctaacgggaagatcgccaaggacgctaaggagaccgtgcaggagagggtctccgagttcatctccttcatcactagcgaagcgagtgacaagtcccagagggagaagcggaagaccatcaatggcgacgatctgctgtgggctatggccacgctggggtttgaagactacattgaacccctcaaggtgtacctgcagaagtacagagagatggagggtgatagcaagttaactgcaaaatctagcgatggctcaattaaaaaggatgcccttggtcatgtgggagcaagtagctcagctgcacaagggatgggccaacagggagcatacaaccaaggaatgggttatatgcaaccccagtaccataacggggatatctcaaactag

SEQ ID NO: 70 - DNA, 558 bp, Zea mays
atggcggaagctccggcgagccctggcggcggcggcgggagccacgagagcgggagccccaggggaggcggaggcggtggcagcgtcagggagcaggacaggttcctgcccatcgccaacatcagtcgcatcatgaagaaggccaggccggctaacgggaagaccatcccggctaacgggaagatcgccaaggacgctaaggagaccgtgcaggagagggtctccgagttcatctccttcatcactagcgaagcgagtgacaagtcccagagggagaagcggaagaccatcaatggcgacgataggctgtgggctatggccacgctggggtttgaagactacattgaacccctcaaggtgtacctgcagaagtacagagagatggagggtgatagcaagttaactgcaaaatctagcgatggctcaattaaaaaggatgcccttggtcatgtgggagcaagtagctcagctgcacaagggatgggccaacagggagcatacaaccaaggaatgggttatatgcaaccccagtaccataacggggatatctcaaactag

SEQ ID NO: 71 - DNA, 567 bp, Glycine max; identical to SEQ ID NO: 43

SEQ ID NO: 72 - DNA, 915 bp, Glycine max; identical to SEQ ID NO: 29

SEQ ID NO: 73 - DNA, 1845 bp, Glycine max; identical to SEQ ID NO: 30

SEQ ID NO: 74 - DNA, 1221 bp, Zea mays; identical to SEQ ID NO: 46

SEQ ID NO: 75 - DNA, 1290 bp, Glycine max; identical to SEQ ID NO: 47

SEQ ID NO: 76 - DNA, 2157 bp, Zea mays; identical to SEQ ID NO: 45

SEQ ID NO: 77 - DNA, 846 bp, Arabidopsis thaliana; identical to SEQ ID NO: 31

SEQ ID NO: 78 - DNA, 900 bp, Glycine max
atggatcctggcagtggaggaaacagtcttggcaacaactctaatctcgcttcaaaacaacgtttacggtggacacatgaattacatgagcgctttgttgatgctgtggctcaacttggtgggccagatcgtgccacacccaaaggtgtcctcagagttatgggtgtacaaggcttgaccatttaccatgtcaaaagccatttacagaaataccgacttgcaaaatatttacctgactcctcatctgatgaagggaaaaaggctgacaagaaagaaacaggggatatgctttccaatcttgatggttcatctgggatgcagattactgaagcactaaagctccaaatggaggttcagaagcgactacatgaacaattggaggtgcagagacagctacaattacggatagaggcccagggtaaatacctgaaaaagataatcgaagaacagcagcggctcagtggcgttctttcggagactcctggctctggggttgcagccgttgctccaggggatgcatgccaagaacctgataataagactgacccgtcaacccctgaccctgaaaaggccgccaaagaccgtgctccggcaaaaagtctttcaatagaatctttttcatctcaccttgaaccgatgacaccagattctggctgccatgttggttcccctgctgaaagccctaaaggggagagatcagccaagaagcaacgagtaatcatggatggcgtgtattctaaaccagaaatggtgcttccacatcagatactggagtcaagcatgtcattataccagcaacctaacactgtttttcttggccaagaccaatttgatccttctttgggtatatctaccagaagtggtgaggaattggataaggttggtggtggtaatctgtag

SEQ ID NO: 79 - DNA, 768 bp, Zea mays
atggggaggggacgcgtcgagctgaagcggatcgagaacaagatcaaccgccaggtcaccttctccaagcgccgcaacggcctgctcaagaaggcctacgagctctccgtgctctgcgacgccggggtcgcgctcatcatcttctccggccgcggcaagctctacgagttcggcagcgccggcgtaactaaaactttagaaaggtatcaacatttctgctacaatgctcaagattccaacaatggtgcactctctgaatctcagagctggtaccaggaaatatcaaaactgagggcaaaattcgaggccttgcagcgcactcagagacacttgcttggggaggaccttggcccactgagtgtgaaggaattgcagcagctagagaaacagctagaatgtgctttgtcacaggcaagacagagaaagacacaacttatgatggagcaagtggaagagcttcgcagaacggagcgtcacctgggagaaatgaacaggcaactcaaacacaagctcgaagctgaaggctgtagcaactacacaaccttgcagcatgccgcctgctggccagctcccggcggcaccatcgtggagcatgacggcgccacctatcaagtgcatccgcctgcccactcagttgctatggactgtgaacccactctgcaaatcgggtaccctcatcaccagtttccgccccctgaggcagccaataatatcccaaggagcgctgccacaggcgagaacaacttcatgctgggatgggttctttag

SEQ ID NO: 80 - DNA, 768 bp, Zea mays
atggggaggggacgagttgagctcaagcggatcgagaacaagatcaaccgccaggtcaccttctccaagcgccgcaacggcctgctcaagaaggcctacgagctctccgtgctctgcgacgccgaggtcgcgctcatcatcttctccagccgcggcaagctctacgagttcggcagcgccggcataacaaaaactttagaaaggtaccaacattgctgctacaatgctcaagattccaatggcgcactctctgaaactcagagctggtaccaggaaatgtcaaaactgagggcaaaattcgaggccttgcagcgcactcagaggcacttgcttggggaggaacttggcccactgagtgtgaaggagttgcagcagctagagaaacagctcgaatgtgctttgtcacaggcaagacagagaaagacacaacttatgatggagcaagtggaagagctccgcagaaaggagcgacacctgggagaaatgaacaggcaactcaaacacaagcttgaagctgaaggttgtagcaactacagaaccctgcagcatgcagcctggccagctcccggcagcaccatggtggagcatgacggcgccacctatcatgtgcatccaacaactgctcaatcggttgcaatggactgtgaacccactctgcaaatcgggtaccctcctcatcaccagtttctgccttccgaggcagccaataatatcccaaggagcccccctggaggcgagaacaacttcatgctgggatgggttctttag

SEQ ID NO: 81 - DNA, 612 bp, Glycine max
atggctcgcggaaaggttcagctgaagcgaattgagaaccctgtgcacaggcaagttaccttctgcaagcgccgagctgggcttcttaagaaggctaaggagctctctgtgctgtgcgatgctgaaattggccttttcattttctccgcccatggaaagctctatgaactagccaccaaaggaaccatgcaagggctcattgagaggtacatgaagttcacacgaggggctcagcctgaagcagcagcacctgaagcacatcctcttctggttgctaaagaggaaactaacgcgctaaaacaagaaatccaaacattgcaaaagggtatcagttatttgtttgaaggaggaaataagactatggcaattgatgaattacaactgctagagaagaatctcgaaacttggatataccatattcgttcaatgaagatgaacattatgttacaagaaattcaagctttgaaagataaggagggaacacttaaagcggcaaataaatatctccatgacaagattgtggagaatactgcgatttctaactttgctgaatttgctactgatacttcttacccactaattgtacaagatgggggttttcaactctattag

SEQ ID NO: 82 - DNA, 1191 bp, Arabidopsis thaliana
atgagtttgttctgtaattcaatcgaaaccctttatccaaaaccattcctttcacacaaatctcacttctttaccttctccaattccaaattccaaaaccctaaattcacaagcttcccacttcgtcaccaatggcggatcgaatcatgtctgaaatcagcatcttcatcagaaatcgatatggtaagaaacaaagaaggtatctttgcaccaaaggagaagaaagttgtagtcttatgggacttagacaacaaaccaccacgaggtccaccatacgaagccgcaacagctctccgtaaagtcgctgagaaactcggccgagtcgtcgaaatctccgcttacgcaaatcgtcatgcttttatccatttacctcattgggtcgtcgaagagagacgagaaaggaggaaccttgatttcatggagaggaaaggagaagtgactccaattgatccgtacatttgtggtgtttgtggtcgcaagtgtaaaaccaatcttgatttgaagaaacatttcaagcagcttcatgagagggagagacagaagaaagttaataggatgagatctttgaaaggtaagaaacgtcagaagtttaaggagcgttatgtttcagggaatgagaagtataatgaggctgcgaggagtttgttgactcctaaagttggatatggtttagaggctgagctacgtcgagcaggggtttatgttaagacggttgaggataagcctcaggctgcggattgggcggttaagagacagatacaacattcaatgactagagggattgattggttggttttggtgtcggatgataaggatttttctgatatgttgaggaaagctagagaggctgatcttgggactttggttgttagtgatatggatagagcattgggaaggcatgctgatttgtgggtgccttggagtggtgttgagaagggagagattggtgagaaggatttgattccggggaagagaccaaggtttgaggaggatgaggtgggatttggtggtaatgatgagttgttttcgttgtcgtatgatgaggatgagaaggcggagatgacggtggagagtgatgggtttgggaggtttaatgtatcggcgttttcggaagatgaatgggtggaggatgaaggagactttgtgttgagtgatagtagtgatgatgatagtgatgatgagcttttctag

SEQ ID NO: 83 - DNA, 1660 bp, Glycine max
tcgttaccatgcaaacttctaagaagcacccaacttcagctggtatccatttatacctgcagcctgcacaagatattgatccttacactcattaccaaatattgcaaagcaattcatgccatgataatagcagcagccagggaaccactatttcttttgaaaccagcaaggagcaatactttacccttgaatcatccccagcaatcaatgatctcataggttgtgattctccttcctatgctagtgtatcatccaataggagtcctttttctccacaagcttctcattcagaccagcatcagtcatcagacaacacctatggatcaccaacaagtgcacactctagatatgatgatgacggctacgaattgaagaacaagcttagagaactcgagatttcgttgttggggcctgattcagacattgttgatagttggcactgctcctacaagggtggccgccacagagcatcatctccaacggctaaacacaattgggatcagattgtggaaatgattccaaaattagacttgaaagaagtcctcattcggtgtgcacaagccgtggcagatgatgatattgaaacagcagtgggatttatgaacaatgtattggcaaagatggtatcagttgggggtgatccgatccagaggttaggtgcctacatgttggagggtctaagagcaaggttggagtcctcagggagcataatctacaaggccttgaaatgtgaacaaccaacaagcaatgatctcatgacttacatgcacatcctgtaccagatttgcccatattggaagtttgcttacacatctgcaaatgctgtcattggagaagcaatgctgaatgaatcaagaattcacataattgacttccaagttgcacagggcactcagtggctgttgcttattcaggctcttgcatctcgtccaggtggagcacctttcattcgtgtaaccggagttgatgattcacaatcatttcatgcaaggggtggaggacttcacattgtaggaaaacgcctctcagattatgccaaatcttgtggagttccatttgagttccacagtgctgctatgtgtggaagtgagcttgaactagaaaaccttgtaattcaacccggggaagctctagttgtgaacttcccttttgttttgcaccacatgccagatgagagtgtgagcacagagaaccatagggacaggctattgagactggtcaaaagcttgtcacccaaggttgtgacccttgttgagcaagaatccaacaccaacacttctccctttttccaaaggtttgttgagaccttgagttactacactgctatgtttgagtccatagatgtggccctccccagagatgataagcaaaggatcaatgcagaacaacactgcgtggctcgcgacatcgtcaacatggtagcttgtgagggggatgagaggctggaaaggcatgaactcttagggaagtggaggtcaagattttcaatggctggttttgcaccatgccctttgagttcctcagtcacagctgcagttaggaatatgttgaatgaattcaatgaaaattataggcttcaacatagagatggcgctctttatctaggatggaagagtagagctatgtgtacctcttctgcttggagatgttactagaaccc

SEQ ID NO: 84 - DNA, 1191 bp, Arabidopsis thaliana; identical to SEQ ID NO: 82

SEQ ID NO: 85 - DNA, 579 bp, Arabidopsis thaliana
atggacatttctgcgcagagatttgccatgaacggaagaagcatgagactccctcccgggtttcggttcgatcccgatgatgaagatcttgtgttcgagtatctcgccaagaaggtcctccaccgtccaatggacttcgatctccctgagctccgttcttgcaatgttgatccatgggacttgctaggagagaagaacaaggaagtgtattacttcgtgaagaaggaagagcgagagaggaagggaagagagacgttatccggttattgggaagagtgtgaagaagaggaagtaatggaggctggtggtcgtgattgtattcatttagaaggaaggagaaagacatttgctttctttattggaaaaaaacctcgagggacaataactccatggatcatgtacgagttccgacttctttcctctagagctacaaggtggtcatcgtcccctctacctcggggtgaggtaggaaaatggagggcggtgaaagtcgtagtgaaggaagagaatgatgaagagatggtggaggatgagcacgagtctgacgagtctgatggcgaggaagttattcaaagccgg

SEQ ID NO: 86 - DNA, 561 bp, Glycine max
atggccaaagaaggtcttggacttgaaatcaccgagctaaggttgggtctacccgatgcggagcatgtaactgtggtcaataagaatgagaagaagagggccttctcgcaaattgatgatgaaaatagctcctccggcggcgaccggaaaatcaagaccaataagagtcaagtggtggggtggcctccggtgtgctcttaccggaagaagaacagcatgaacgaaggttcaaagatgtacgtgaaggttagcatggacggtgctcctttcttgcgcaaaattgatttgggtctccataaggggtactcagatttagccttggctttggacaagctctttggttcctatggaatggtggaggccttgaagaatgcggacaattctgaacacgttcccatttatgaggacaaagatggtgactggatgcttgttggagatgtcccttgggaaatgtttatggagtcatgcaagaggctgaggattatgaagaggtcagatgccaagggcttcggtttgcaaccaaaaggatctctgaagggattcatagaaagcgcggcaaag

SEQ ID NO: 87 - DNA, 825 bp, Arabidopsis thaliana
atggcgaatgcatcacccttgtctccgactaaccaacacttcttccagcctcttcttcccggattccagagcaacctcaaaattcctgtgaactacttctctgagcacatcgagggaaaacacgaaggcaagactgtaacgttgagaacagatgcgtcggagagaacatgggaagtaaagatggagggtcatagactcacggaaggttggaaagagttcgttgaggcacatgatcttcgaatcggtgactttgttgtctttagacatgaaggagacatggtgttccatgtcactgctttgggacctagttgctgtgagatccaatacccacagtctagcagacatgaagaaggcgaagagagtggtgaaaatgaaatatccgagaaagaaggtgaagagaatgtgcaaaaagaatctgataagtcttcatcagatctgaattgttttagccaatccgtgacgcattcaaacatatcaagagatgcagtgagtgtgccgagagatttcgtgaagcgaagtggttttagtaaaggaaggcatgagatagttttgatgaacgaagaaggaaagtcatgggaatcagaagtaaagagttatatgtctggtgcggtttatttagttggaggttggacaactttctgcaccgaaaataaattagatgttggagattcttgcacattcaaactgttgcaaaaggcgaaaacgcccgtgtttcagctctgcagccgcacaaaggtggagagtatgaacataactggagaaagcaagtttgtgaagttaactcctacaccaagcagccttgcgcttggtaaaagcatctaccgt

SEQ ID NO: 88 - DNA, 828 bp, Zea mays
atgctgctgaacccggcgtcagagacgtcggtgctagacaccatccggcagcacctcctcgaggagccagcggcggcggaggcgcggccggccgacgagagcttcgggagcctggtggcggaccagtggagcggctcgctcccgttccgcaccgacgacgccgacgacatggtggtgttcggggtgctgcaggacgccttcgcctacggctggctgcccgacggctcattcgtgcacgtgaagcccgagccagtgcggtcccccgactcgtcctcctaccacccctgctcctacgacggctcaccctgcttcggcctcctggacccggagccgccgctgacgcccggcaccaccacgcccgggagggggcaggaggaggccgcggcggccatggcccggggcaagcactacaggggggtgaggcagcgcccgtggggcaagttcgcggcggagatcagggaccccgccaggaacggcgcgcgcgtctggctcggcacgtacgacaccgccgaggacgcggcgctcgcctacgaccgcgccgcctaccgcatgcgcggctcgcgcgcgctcctcaacttcccgctccgcatcggctccggggacaagcggccgtcgccggcgccgcccgagcccgccacctcctcggactcctcgtcttcggccagcggctcgcacaagaggcggaagcgaggcgaggccgcggctgccaacatggccatggcgctggtgcccccgccctcccagcttaaccggccgccccagccgtggttccctgccgcgccggtcgagcaggcggcgatggctccgcgcgtggagcagatcgtcgtc

SEQ ID NO: 89 - DNA, 579 bp, Arabidopsis thaliana; identical to SEQ ID NO: 85

SEQ ID NO: 90 - DNA, 2529 bp, Glycine max
atggcatcatcggaggtgacgatgaagggaaattgcttgaaccacaacgacggcggagccacggagcctcattcgccgtccacggccaaagacgcagaagctgcacttttcagggaactatggcacgcatgtgccggtcctctagtcacggtaccgcgggaaaaagagcgcgtgttttatttccctcaaggacatattgagcaggtggaggcgtcgacgaatcaggtggcggaccagcacatgccggtttacgatctcccacccaagatcctttgtcgggtcatcaacgtgcagctgaaggccgagcccgacacggatgaggtgtttgctcaggtgactttgcttccggagccaaaccaagatgagaatgccgtggagaaagagccaccaccacctccgccaccacggtttcatgttcattctttctgtaagactctgacggcgtccgatacgagtacccatggtgggttttctgtgctgagacgacatgctgatgaatgtcttcctcctctggatatgtcgaagcagccacccacacaggaattggtggctaaggatcttcatgcaaatgaatggcgatttaaacatatctttcgaggtcaaccgcgtagacacttgcttcagagtggttggagtgtttttgtcagctccaaaaggcttgttgctggggatgcatttatatttcttagaggtgaaaatggggaacttcgtgttggtgtccgacgtgcaatgagacagcagggtaatgttccatcctcagttatctcaagccacagcatgcatctcggtgtccttgcaactgcttggcatgccatcttgaccgggaccatcttcactgtttattacaaacctaggaccagtcccgccgaatttattgttccgtatgatcaatatatggagtctttaaaaaatagttatagcatcgggatgcggttcaaaatgaggtttgaaggtgaagaggctccagagcagaggtttactggtaccgttgttggaatagaagattctgatcccaaaaggtggagagattccaaatggagatgcctcaaggtgagatgggatgaaacatccaacacccctcggccagagagagtttccccttggaaaatagagccggctcttgctcccccggctctaaatcctctttcaatgcccaggcctaaaaggcctcggtctaatgcagttccttcatccccagattcttctgttcttactcgagaagcatcatctaaagtaagcatagacccttcaccggcaaatgggtttccaagggtcttgcaaggtcaagaattctcgaccttgagaggcaattttacagaaagtaacgagtttgatactgccgagaagtctgttgtttggccacctactgcagtagatgatgaaaagatggatgtttctacttcaaggaggtatggttcagagagctggatgtcaatggggaggaatgagcctacatattcggatcttctttcaggctttgggaccagtggggatccttctcattcatccctgaaggatcaaatgagccctgcttattctgctagaaagcaatcattggatcatgaaggcaaacttcacatgcctcatccgtggcctgtaatgccctctagtctgtcactgaacatcttggactctaatgcaaaaggtcctacacatggtggtgatacatctttccaagctcgagggaatttgaggttcagtgcatttggtgaataccctgcactgcatggtcataaagttgaggattcacatggaaacttgatgccacccccacctgcaccccaaactcaatatcagagtccttgttcaagagagcttatgtcaaaacatgtatcagcaaaaacttgtgaggctgtgaaaccaaaagatggtgactgtaagctatttggcttctcacttatcagtggccctatcgtaccagagccttctttatcacaaagaaatgtgagtgagcctgctggtcagatgcatcttacagcacaccaacaaagaacatctgaaaatgatgagaagtcagatcactcaaagggatcaagacctgtagatgatctagttgttgatgaccatgacagaccattacagacttctcagtcgcatactaaagacgttcaagccaaacctctcagtggttctgctaggagttgcactaaagttcacaagaagggcattgcacttggtagatcagtggaccttacaaagtacagtggctatgatgaattagttgccgaattggatcagctgtttgaatttgggggtgaattattgtcaactaaaaaagattggcttatcgtctatactgataatgagggtgatatgatgcttgtaggcgatgatccatggcaggaattctgtgccatggtttgcaaaatttatatctaccctaaagaggagatccagaaaatgagcccaggtacactgagctcgaaaaatgaagagaaccagtcggtgatggctagtgatggtgcagatgcaaaagttgttaaatgtcagccacatcaaaagttcaattcagaaaatggccttgacgcc

SEQ ID NO: 91 - DNA, 606 bp, Glycine max
atggccagaccacaacagcgttaccgaggtgtccgacaaaggcattggggctcttgggtctccgaaattcgccaccccatattgaagactaggatatggcttggtacatttgaaacagctgaggatgctgctagggcctatgatgaagcagctaggctaatgtgtggtgcaagggcaagaacaaacttccctttcaatccaaatgtgtcacactcatcatcttctagttcaaagcttctctcagcaactttgactgcaaaacttcacaggtgctacatggcttctttgcaagtgacaagacaagctttggcatctgagtctcagagaacaccaccctcagtgcaaaatgcaacaacctccacaaccacaccaattagcaacaacttcagtgtgaagagtgagcaaactcatgcagtgttgccacataagagaccagaggaggagcaagagtcagaggcaaataggggtgtgaaaagggttaaggctgtggaaaatgttcctctgcaattcaagcctcttgaggaagatcacatagagcaaatgattgaggagcttcttgattatggatctattgaactctgctctgtcatttcaccccaggccctc

SEQ ID NO: 92 - DNA, 729 bp, Zea mays
atgaatgaactggacttgaatacagctgctcttgatccggatcattatgctacaggattgagagttcttcttcagaaggagctccgaaatagcgatgtaagccagcttgggagaattgttctcccaaagaaggaggcggagtcttacctccctattctgatggcaaaggatggaaagagtttatgcatgcatgacttgctaaattcacaactgtggaccttcaagtatagatattggttcaacaacaaaagcaggatgtatgtgcttgaaaataccggagattatgtaaaagctcatgaccttcagcaaggagacttcatcgtgatctacaaggacgacgagaacaaccgctttgtcataggagcaaagaaggcaggagatgagcagaccgccactgtacctcaagtccatgaacacatgcacatctctgccgcactgccagctccacaagcgttccatgactatgcaggccccgtcgcagcagaagctggtatgctcgcgatcgtgccacagggtgacgagatattcgacggcatactgaactccctgccggagataccagtggcgaacgtgaggtactccgacttcttcgacccgttcggtgactccatggacatggcgaatccgctgagctcctccaataacccctcggtcaacctggctacgcatttccatgacgagaggatcgggagctgctcgtttccctacccaaaatccgggcctcagatg

SEQ ID NO: 93 - DNA, 702 bp, Lycopersicon esculentum
atggatcaacagttaccaccgacgaacttcccggtagattttccggtgtatcgccggaattcaagcttcagtcgtctaattccctgtttaactgaaaaatggggagatttaccactaaaagtcgatgattccgaagatatggtaatttacggtctattaaaagacgctctaagcgtcggatggtcgccgtttaatttcaccgccggcgaagtaaaatcggagccgagagaagaaattgaatcgtcgcttgaattttcaccttctccggcggagaccacggcagctccggcggctgaaacaccgaaaggaagacattatagaggcgttagacagcgtccgtgggggaaatttgcggcggagattagagatccggcgaagaacggagctagggtttggcttggaacgtacgaaacagctgaagaagctgcaattgcttatgataaagctgcttatagaatgagaggatcaaaagcacatttgaatttcccgcaccggatcggtttgaatgaaccggaaccggttcgagttacggcgaaaaggcgagcatcgccggaaccggcaagctcgtcgggaaacggttccatgaaacggagaagaaaagccgttcagaaatgtgatggagaaatggcgagtagatcaagtgtcatgcaagttgaatgtcaaattgaacaattgacaggtgtccatcaactattggtcatt

SEQ ID NO: 94 - DNA, 1554 bp, Zea mays
atgctcccgccgttcggcaacccgctctgggtaccggaggacgtcgacgaccagcagcagcaccacgcgccgccgccgacgcccatggggttggggccggggcaggggcacgatgaacagaacctcctggccctggcctccgccgccgccatgggggccggcggtattttcagctcgccagcggtgctcgacgacgactggtacttcgaccccgtggctgcggccgccgccgccggcgctcaggggcagctgctcctggcaccgccgggcccagcgcccgacgccgggtcgcagatgttctcgctcttcaacgtcggcggcgccgcgacgttcgacgtccatgggttcgacctcggcctcggcggcggaggcggtggcgacctggtcccgtttgccggcgcggggaatgcgtcgaattccgcgtccttttccctggtaccggcagggaacgccggcggcttcctcggctcgttcggcggcttcggtacagcgccggcgcaaatgccggactttggcgggctcggcgggttcgacatgttcaacagcggcgccggctcctcctccgcggcgccccctcctcctgcctcggtgtcactgacggcgcccttctctgggcgcgggaaggccgccgtgctccgcccgctggagatcttcccgcccgtgggcgcgcagccgacgctgttccagaagcgcgcgctccgccgcaacgccggcgaggaggacgacgacaagaagcgcaaggtggaggccgtcgccgcggccgcgggggcttcctcgggcggcggcggtgacacggtgctggacgacgccgacgacgacgacggcgggagcatcgacgcgtccgggctcaactacgactcggaggacgccaggggcgttgaggacagtgggaagaaggacggcaaggactccaacgccaacagcacggtgactggcggcgccacgggcgacgggaagggtaagaggaaggggttgccggccaagaacctcatggcagagcgccgtcgccggaagaagcttaatgaccggctctacatgctccggtccgtcgtgcccaagatcagcaagatggacagggcctccattctcggcgacgcaatcgagtacctgaaggagctgctgcagaagatcaacgatcttcagaatgatctggagtcgtccccttccacggcctcgctgcctccgacgcccacaagcttccaccctctgaccccgacgctgcccactttaccgtctcgcgtgaaggaagagctgtgcccaagcgcattgcctagccctacttctcagcaaccgagggttgaggtgaggatgagggaaggccgggcagtgaacatccacatgctgtgcgctcgcaggcccggtctcctgctctctgccatgagagcgatcgaaggcctcggcctcgatgtccagcaagctgtcatcagttgcttcaatgggttttccttggacatcttcaaggccgagctgtgcaaggaaggccctgggcttctgccggaggagatcaagtccgtgctcctgcagtccgctgggttccatggcggcgtgatgccg

SEQ ID NO: 95 - DNA, 561 bp, Glycine max; identical to SEQ ID NO: 86

SEQ ID NO: 96 - protein, 177 aa, Zea mays
MSQISEMDSEEVGGSSPEASGGGGRGYIPGYPMGSGWEDSSALLSDNLSGVKRPRDSSEPGQSGLTHQFSVPKTSSEMATIEKFLQFQDAVPCKIRAKRGCATHPRSIAERVRRTKISERIRKLQELVPNMDKQTNTSDMLDLAVDYIKDLQKQVKVLKESQDNCTCSASKNQQHSC

SEQ ID NO: 97 - protein, 497 aa, Oryza sativa
  misc_feature (461)..(461): Xaa can be any naturally occurring amino acid
MYTSPTLLALSFALLLLILLLYYSSSLLYSQLATRRRLTHACARSLPDAYESGMNRGHISSSELIDAKLEERRISTAKHCPSCGNKLDCKPDWVGLPAGVKFDPTDQELIEHLEAKVREEGSRSHPLIDEFIPTIEGEDGICYTHPEKLPGVTRDGLSKHFFHRPSKAYTTGTRKRRKIQTECDVQKGETRWHKTGKTRPVMVSGRQKGCKKILVLYTNFGKHRKPEKTNWVMHQYHLGDLEEEKEGELVVCKIFYQTQPRQCSWSSDRGGGAAATASAVTTAAVQQDQQRRRDSGSGSCSSTRDHEVSATSYSTAGYAVAAAVEMQHLKHAADHFSFAPFRKSFEEVGISGDQVHSNQLGRSEQQHAGQEQQPHRPLLATTTAVPATAFLISRPTNPVSNIVPPAMQHASVVLDHDQFHVPAILLHHDKFQQQQQQKLDRRSAGLEELIMGCTSSSTKGXLQFLTPKRQNGLTSHTGLLTTRIIMDSSNKAAFDMH

SEQ ID NO: 98 - protein, 299 aa, Zea mays
MSFHYHDHGLSMDAAASAAAAAASSPNPSGFSPGIGGEREKAAIAAHPLYERLLEAHVACLRVATPVDQLPRIDAQIAARPPPLAAAAGAAAAGGPSGGEELDLFMTHYVLLLCSFKEQLQQHVRVHAMEAVMGCWELEQSLQSLTGASPGEGTGGTMSDDEDNQVDSEANMFDGNDGSDGMGFGPLILTEGERSLVERVRKELKNELKQGYKEKLVDIREEIMRKRRAGKLPGDTASVLKAWWQAHSKWPYPTEDDKARLVQETGLQLKQINNWFINQRKRNWHSNPTSSAEKTKKKR

SEQ ID NO: 99 - protein, 214 aa, Zea mays
MEDGSSAPRRATPPTRRSRSADFHNFSERRRRDRINEKLRALQELLPNCTKTDKVSMLDEAIDYLKSLQLQLQMLVMGKGGGMAPVVPPELQQYMHYITADPAHQMMPPPLRPSAGQLQPAAGRQFQITQAAAAAANNDNDPQRRRQSNVESDFLSQMQNLHPSDQPPHHHNFLRPPRLQLFTPEQRGGGGGLPTTSHNAGWISGRSSSYNFME

SEQ ID NO: 100 - protein, 214 aa, Zea mays; identical to SEQ ID NO: 99

SEQ ID NO: 101 - protein, 311 aa, Zea mays
MNEQGLGGLGGGRGAVQGHGREAMALLQHQQLQQQRRQLEEEDEVRRQMFGGVAAFPAALGHGQQVDYGEDAGGLGDSDAGGSEPEPPLERTRGGSGGGGKRSRAAEVHNLSEKRRRSKINEKMKALQSLIPNSNKTDKASMLDEAIEYLKQLQLQVQMLSMRNGVYLNPPYLSGTIEPAQASQMFAAVGGGNITASSSGAVMPPVNQSSGLQVFDPLNPPRDQPLSFVLPNVDKTIQEAPFHLESSQFHPRPFRMPESSEMMLPGEVVAKHQLTSIQGRVSMPGIGMNPIRQESSTVKADQFDGCSHNKE

SEQ ID NO: 102 - protein, 347 aa, Glycine max
MPAGSCTSNAAQQNVNAHHPSFTASQLQDGKILAVDSTASFVSGSAACSSFKGHGASAANVSSSSAGVSENENDDYDCESEEGVEAPAEEVPTKAASSRSSSKRSRAAEVHNLSEKRRRGRINEKMKALQNLIPNSNKTDKASMLDEAIEYLKQLQLQVQMLSMRNGLSLHPMCFPEGLQPLQLSQMGMELSERNRFTSLNMSATLPLHQDNNPLHYASNLPNKHNLPNQPSVPYPPYIDNPETSFGLEPRIQTDMKPLQHKGGSSEPIRGEDILQHQQSSGIHSDANTLGGSQVVKEFESGTRLSFPFDTQACEPKDNSNSSQPCIGGRDHSGVIIRNSETNIVGR

SEQ ID NO: 103 - protein, 214 aa, Zea mays; identical to SEQ ID NO: 99

SEQ ID NO: 104 - protein, 441 aa, Oryza sativa
MKAKRAADDEEEGGERERARGKRLAAEGKQGLVVVSTGEEEEAAAETRGLRLLSLLLRCAEAVAMDQLPEARDLLPEIAELASPFGSSPERVAAYFGDALCARVLSSYLGAYSPLALRPLAAAQSRRISGAFQAYNALSPLVKFSHFTANQAIFQALDGEDRVHVIDLDIMQGLQWPGLFHILASRPTKPRSLRITGLGASLDVLEATGRRLADFAASLGLPFEFRPIEGKIGHVADAAALLGPRHHGEATVVHWMHHCLYDVTGSDAGTVRLLKSLRPKLITIVEQDLGHSGDFLGRFVEALHYYSALFDALGDGAGAAEEEAAERHAVERQLLGAEIRNIVAVGGPKRTGEVRVERWGDELRRAGFRPVTLAGSPAAQARLLLGMYPWKGYTLVEEDGCLKLGWKDLSLLTASSWEPTDGDADADVAVAGDTHHESHDS

SEQ ID NO: 105 - protein, 388 aa, Zea mays
MDGRESTVASGPNFSSFFAQHRGIGAPGVPGHSQGLHAPPPGGYRQHLDAVSAGYAFQTPHVGGPSIGQGYEASPHAAQHSAGGGSGSGGCGGMDIGMGAAVSADVKGDQGSGPGQDEQVKKKRGRPRKYKPDGSVTLGLSPTSSSTPHSSSSGMGTMVNTPGSGFGSGGSGGSGSGAPSEKRGRGRPPGSGKMQQLASLGKWFLGSVGTGFTPHVIIIQPGEDVAARIMAFSQQGPRAVCIISATGAISTATLHQDSDSGGVVTYEGRFEILCLSGSYLVVEDGGTRTRSGGLCIALCGPDHRVIGGSVGGVLTAAGTVQVIVGSFMYGGSKKNKVKAEVDMEPEEVAPAEHSGMVPPAMSGGGWEAGMMRQMDSRTPAIDINSIRG

SEQ ID NO: 106 - protein, 324 aa, Zea mays
MGRPPCCDKVGVKKGPWTPEEDLMLVSYVQEHGPGNWRAVPTNTGLMRCSKSCRLRWTNYLRPGIKRGNFTDQEEKLIIHLQALLGNRWAAIASYLPERTDNDIKNYWNTHLKKKLKKMQAGEGGGGDGDGAAGASEGGAVATAGAGGKRPAVPKGQWERRLQTDIHTARQALRDALSLEPSPSAPPPAKVEPLPATAPGYKTYASSAENIARLLEGWLRPGSGGGKGPEASGSTSTTATTQQRPQCSGEGAASASASHSGGAPANAAAQTPECSTETSKVAGAGSAPPAFSMLESWLLDDGMGHGEDGLMTDVVPLGDPSEFF

SEQ ID NO: 107 - protein, 240 aa, Zea mays
MQEASSAAAGAEPGRRAAQHQFAGVDLRRPKGYAPPAPAVSEGDPCPRCASRDTKFCYYNNYNTSQPRHFCKGCRRYWTKGGTLRNVPVGGGTRKKPSLSSSSSSSYAAAADADRQPKKKPASKKRRVVAPAPELAAAADPGKTAPTTTTTTTTTSEITTETGALEDSDSLAHLLLQPGTEDAEAVALGLGLSDFPSAGKAVLDDEDSFVWPAASFDMGACWAGAGFADPDPACIFLNLP

SEQ ID NO: 108 - protein, 233 aa, Glycine max
MFQESSVTRWPTQWTRYHDKLFERALLVVPEDLPDRWEKIADQVPGKSAVEVREHYEALVHDVFEIDSGRVEVPSYVDDSVAMPPSGGAGISTWDNANQISFGSKLKQQGENERKKGTPWTEEEHRLFLIGLSKFGKGDWRSISRNVVVTRTPTQVASHAQKYFLRQNSVKKERKRSSIHDITTVDSNSAPMPIDQTWVPPPGGSLQQSQQYPSSNMHDQMGTFGYSNYGFDM

SEQ ID NO: 109 - protein, 368 aa, Glycine max
MINSTKEADFPLKQEGLSSGDHEKAKAPSTSSSSSQWLKLKDPRIVRVSRAFGGKDRHSKVCTIRGLRDRRVRLSVPTAIHLYDLQDRLGLNQPSKVVDWLLNAAKHEIDELPPLPIPPGNFTLGYPSLVSCNEVSTSREGSGQNTLLWKPKSGEMVSDDKANWMNRSEGDDDNNHNNSNGKEGSNNNICHGGTLVLPNNLLPRPNHPSFLSLMNIMPSLGYQWEANNSAHDVNIGQWQNHGFLNQTDVHSINVVPFPSTLALSTGSDTTTTSQILVCPPHGATTQPYFPSSHHVAAMEMNARQINHYQMLSSSSHQNLLANSLNPSSQQLMSQSEKLPFSLGIRPKLFHSPNRSESHSQKDQDLPSK

SEQ ID NO: 110 - protein, 354 aa, Arabidopsis thaliana
MELLMCSGQAESGGSSSTESSSLSGGLRFGQKIYFEDGSGSRSKNRVNTVRKSSTTARCQVEGCRMDLSNVKAYYSRHKVCCIHSKSSKVIVSGLHQRFCQQCSRFHQLSEFDLEKRSCRRRLACHNERRRKPQPTTALFTSHYSRIAPSLYGNPNAAMIKSVLGDPTAWSTARSVMQRPGPWQINPVRETHPHMNVLSHGSSSFTTCPEMINNNSTDSSCALSLLSNSYPIHQQQLQTPTNTWRPSSGFDSMISFSDKVTMAQPPPISTHQPPISTHQQYLSQTWEVIAGEKSNSHYMSPVSQISEPADFQISNGTTMGGFELYLHQQVLKQYMEPENTRAYDSSPQHFNWSL

SEQ ID NO: 111 - protein, 547 aa, Arabidopsis thaliana
MKRGYGETWDPPPKPLPASRSGEGPSMADKKKADDDNNNSNMDDELLAVLGYKVRSSEMAEVAQKLEQLEMVLSNDDVGSTVLNDSVHYNPSDLSNWVESMLSELNNPASSDLDTTRSCVDRSEYDLRAIPGLSAFPKEEEVFDEEASSKRIRLGSWCESSDESTRSVVLVDSQETGVRLVHALVACAEAIHQENLNLADALVKRVGTLAGSQAGAMGKVATYFAQALARRIYRDYTAETDVCAAVNPSFEEVLEMHFYESCPYLKFAHFTANQAILEAVTTARRVHVIDLGLNQGMQWPALMQALALRPGGPPSFRLTGIGPPQTENSDSLQQLGWKLAQFAQNMGVEFEFKGLAAESLSDLEPEMFETRPESETLVVNSVFELHRLLARSGSIEKLLNTVKAIKPSIVTVVEQEANHNGIVFLDRFNEALHYYSSLFDSLEDSYSLPSQDRVMSEVYLGRQILNVVAAEGSDRVERHETAAQWRIRMKSAGFDPIHLGSSAFKQASMLLSLYATGDGYRVEENDGCLMIGWQTRPLITTSAWKLA

SEQ ID NO: 112 - protein, 295 aa, Zea mays
MAKYYWGMLGAATTTTRAGTGSSLIRSTWPPPAAHGGGRSGEPSWEELAFAQDAAGQLGGCVWPPRSYTCTFCRREFRSAQALGGHMNVHRRDRARLRQCAPPDHDQEPIAAPLPAPELADHQQQLLQLHGSPMTKAAVLFSGRPAAACCTHQQTYCNNNREGEGEDSPARYISTTTTIIKESKSKVLISIPAATTAAGSKKAATTIAIIGEEEEEEEEEEEIMVTGRRTKRRRLVHQPFYDLRRLPPASSSPNKGGVEDDDAKVPKLSSPISLSHHLAGRQEEVDLELRLGTSC

SEQ ID NO: 113 - protein, 515 aa, Zea mays
MELAGAASPHPPPESHVAPPRPPPQPPEEDLCEDRGDMSVTGEKPCTHRESDVGQTNSCSLNNSSECENHTPSNDEISEPESNLEMAKTDQGGDVPSGEKVLKKPDKILPCPRCNSMDTKFCYYNNYNIKQPRHFCKSCQRYWTAGGSMRNIPVGAGRRKSKSSSASCRSVLIPVPGSSSVANPGGEASLFPLSVKANQAAVSFGPDSPLCTSMASVLKIGGGGEQVKSCSPASAAAQPRNGETQTQTCAPSSAATTPSDGPGNGLQKGAESAHQNQNQNQNGIIGHSNGVTPVHPIPFFPGPPFVYPWSPAWNGIPAMAAAVCAAPATAEAAISSEHGTASSTVQWNVPPAIVPVLPPGFCGPIPVPVIPPPSVWPLITPWPNAAWSAPWLGPSASVPPGSSRSSGSSTCSDSGCGSGSPVLGKHSRESRPQGDEKAERRCLWIPKTLRIDDPVEAAKSSIWTTLGIEPGDRGMFRPFQSKHGRQQELQASGAARALQANPAALSRSQSFQETT

SEQ ID NO: 114 - protein, 437 aa, Zea mays
MCGGAILSGFIPPSGVAAAAAAAAKKKQQQRCRVTADLLWPGPGSKGAPQDKEEDFEADFREFERGLGEDDVDSAGEGGDPEVQELPPPEPTRFAFATAAKAAVDGVMTTTPKDVQGDRAVKKRGRKNQYRGIRQRPWGKWAAEIRDPNKGVRVWLGTYNTAEEAARAYDAEARKIRGKKAKVNFPDDDATGTRHRPTNAANAARLVAPPPPPKACADEMFNNLKNDDGDNNNNDDLFAMFAFGDNKKEAVPAAKPAAAEGGSGSGSGSFLVPAPAMAAAVPGNKRRSSATNIMVSVSDDQSSNSYGSGSSDLVGSWSWDDAAAAAAMTSDYTSSVFAPASYSYMQGGAPKRMRSSYGGAPPSLAHDAAMPGFGLDKVSYHHYQALPPYYVGSSNASVGNLGLLQQADDAPAPQDGASAGDIWSLDELLMLAAAGAY

SEQ ID NO: 115 - protein, 850 aa, Zea mays
MTSSAAAAAAAAQVAGGGGGGEGDAAAAARGGGGTEDGMYTELWNLCAGPLVTVPRVGDKVYYFPQGHIEQVEASTNQVAEQHMQFYDLPWKILCEVMNVELKAEPDNDEVYAQLTLLPESKQPEENGSSEEMPASPPAALARPRVHSFCKTLTASDTSTHGGFSVLRRHADECLPPLDMTRQPPTQELVAKDLHGVEWRFRHIFRGQPRRHLLQSGWSVFVSAKRLVAGDAFIFLRGDSGELRVGVRRAMRQQANVPSSVISSHSMHLGVLATAWHAVNTGTMFTVYYKPRTSPAEFVVPCDRYMESLKRNYPIGMRFKMRFEGEEAPEQRFTGTIVGNVDPDQAGWAESKWRYLKVRWDEASSIPRPERVSPWQIEPAVSPPPINPLPVHRPKRPRSNAVASLPESSAPTKEAAPKVTLETQQHALQRPLQTQDNVAPKSVFGDNSELDSAHKSSLRPSGFDLDKSTIGMQRKLGSDIWMRMNRPDGYSEMLSGYQPPNEGARNSQGFCSLPDQIAAGRPNFWHTVNAHYQDQQGNHNLFPGSWSMMPSSTGFGMNRQSYPMIQEVGGMSQSCTNTKFGNGVYAALPGRGIDRYPSGWFGHTTPGGRVDDAQPRVIKPQPLVLAHGEALKMKGNSCKLFGIHLDSPAKSEPLKSPPSVATPAAEKWMADGIDADKSPEPHKTPKQLGATQVDPVPERCPQASRGTQCKSQGGSTRSCKKVHKQGMALGRSVDLTKFNGYTELVAELDEMFDFNGELKGCSKEWMVVYTDYEGDMMLVGDDPWNEFCSMVHKIFVYTREEVQRMNPGALNSRPEDSGLANSTERGSASTAAAREAPGYQSASSLNSDNC

SEQ ID NO: 116 - protein, 716 aa, Zea mays
MAAAACAGAEAGRGCGGKDALFVELWKACAGPLSCVPPLGEKVYYLPQGHIEQVEASTNQLAEQQGTPLYNLPWKIPCKLMNIELKVEPDTDEVYAQLTLLPDKKQDENTSTTVEEEEVVVPPALPATNEGPHIHSFCKTLTASDTSTHGGFSVLRRHADECLPPLDMSQHPPNQELVAKDLHGAEWRFRHIFRGQPRRHLLQSGWSVFVSAKRLVAGDAFIFLRGENGELRVGVRRALRHQTTIPSSVISSHNMHLGVLATAWHAVNTDSMFTVYYKPRTSPAEFVVSRDRYYESLKRNYSIGMRFKMRFEGEEAAEQRFTGTIVGIGASDPSGWADSKWRSLKVRWDEPSSISRPERVSPWQIEPSVSPCHVNPLPVRFKRSRSSVNALPSDVSTVTREVTSKVMADSQQNSLTRALHNQGRTQLTVRYHDNSDVKTTQDLTVWSSGTEQQRNNIAAQTKLCLEGWTPTRSPEGYNQIFSAFKPLKDIHNPLGPFPSQISGTHSNSWDTADARYPVQQANYSMLPGTWSLRPHNSGFRMNQQNYLVMPEGANFTGKSAFTSLQDHGTDKCSTGCFGHIESSSHTDHASSSLIRPQPLVLGNGVQKSKGTSFKLFGIPLGSPEKSEPLVSPPSVAYDGKLQTSPSEKGNQLDVVEVDNCSHPSKTVKPLDGPQSDSITENNQPSPEATLNIQNKVQSSSTRSCKKVHHMLHLFPC

SEQ ID NO: 117 - protein, 299 aa, Glycine max
MDPGSGGNSLGNNSNLASKQRLRWTHELHERFVDAVAQLGGPDRATPKGVLRVMGVQGLTIYHVKSHLQKYRLAKYLPDSSSDEGKKADKKETGDMLSNLDGSSGMQITEALKLQMEVQKRLHEQLEVQRQLQLRIEAQGKYLKKIIEEQQRLSGVLSETPGSGVAAVAPGDACQEPDNKTDPSTPDPEKAAKDRAPAKSLSIESFSSHLEPMTPDSGCHVGSPAESPKGERSAKKQRVIMDGVYSKPEMVLPHQILESSMSLYQQPNTVFLGQDQFDPSLGISTRSGEELDKVGGGNL

SEQ ID NO: 118 - protein, 281 aa, Zea mays
MDMDRPEEEGQQRRETMTPVLLRLFGVDVHRGGGSGEPEESPMDLRKSSSMPDLTINPLLSPEEKEGCKGYASDDAELASGQQKRRRRKAQDRKKGIPWTEEEHRKFLDGLRQLGKGDWRGISKGFVTTRTATQVASHAQKYFLRQTNPGMKKRRASLFDVGIADYKDNQVPGPQSIVAAKPAPTQEIIHTDRGDVPIPRYRGLGEILGSNMQVNQLTDYYYFNKNSHVPAGTSLSMASGLETASTVDSLELSIAVNGLELSIAPPSRCVCGGAAGAIKVL

SEQ ID NO: 119 - protein, 584 aa, Zea mays
MALTDATAFPYGLRVLVVDDDPTWLKILEKMLRKCSYEVTTCGLASVAIQILRERRNKFDIVISDVNMPDMDGFKLLELIGLEMDLPVIMMSIDGETSRVMKGVQHGACDYLLKPVRMKELRNIWQHVYRKKMHEVKEIEGNDSYDDLQMFRNGVEGFDERDLFMRADSDTMRKRKDVNKDHADQDSSDGATVKKARVVWSVDLHQKFVNAVNQIGFDKVGPKKILDLMNVPGLTRENVASHLQKYRLYLSRLQKQNEERIMGAARQDFNQKGPSDHLNLRSSFQEQPGNLSNGCQHSSQKVEAQTSILDPHLDDTKTSMPLKVPDKNGISASDAVDPQNITTASPLSGVFSFERMPVNQDRKLSETMILECQSWSGSVPPKQFMQYPKHNHERCDLLGDYSCLPKPDLEHPIAPGHLYAPPPVISMSYNVEEDVRDFSDVKPDLLGCMKSLSPALTCTVESVSAQLSDSVVTSTNSDRKFSSVEGLSSIKDCDFDQERNGAILFTSEEASILCGTDFTCLPEDLSGYQLQGVSFGNKGLNSIDLYQCNDTMLIPGLQNNWYDDDVEFSSETVEFPLLDGGLFA

SEQ ID NO: 120 - protein, 204 aa, Triticum aestivum
MRSSISTKRSRAAAIHNESERKRRDRINQKMQTLQKLVPNSSKTDKASMLDKVIDHLKQLQATVQMMNRMSSMMMPMAMPQLAQMSVMANMAQMAQMAQMGLGMMNMAGPLAQPAYPGLTQPMMQASTPFVAMQPWNAGAGADRQKQSAAVPDAYSAFLACQAAQQNTQQQQQAQPNGMEAYSRMMAMYQKLSQQQTQPGSSKE

SEQ ID NO: 121 - protein, 204 aa, Triticum aestivum
MRSSISTKRSRAAAIHNESERKRRDRINQKMQTLQKLVPNSSKTDKASMLDEVIDHLKQLQATVQMMNRMSSMMMPMAMPQLAQMSVMANMAQMAQMAQMGLGMMNMAGPLAQPAYPGLTQPMMQASTPFVAMQPWNAGAGADRQKQSAAVPDAYSAFLACQAAQQNTQQQQQAQPNGMEAYSRMMAMYQKLSQQQTQPGSSKE

SEQ ID NO: 122 - protein, 276 aa, Zea mays
MDDGDLDFSNPDTYLCPALGTDPPSSCSMDSYFDEILKDTEHHACTHTHTCNPPVHDLSHTHTCVHVHTKIVAASPGDDTADSPSENNTNGSGGNGSNAASKKRPSGNRAAVRKYREKKKAHTASLEEEVVHLRALNQQLVKKLQSHAALEAEVARLRCLLVDIRGRIEGEIGAFPYQRPPPAAKNVDLVSGVDQGGFLAGAAAQVTSSCDFRCNDQMYCSPGMQGAVGGQVLGQGACDVSSIQCVGSTRSASTKLPVCGGMDAVPAACLPNVQNK

SEQ ID NO: 123 - protein, 276 aa, Zea mays
MDDGDLDFSNPDTYLCPALGTDPPSSCSMDSYFDEILKDTEHHACTHTHTCNPPVHDLSHTHTCVHVHTKIVAASPGDDTADSPSENNTNGSGGNGSNAASKKRPSGNRAAVRKYREKKKAHTASLEEEVVHLRALNQQLVKKLQSHAALEAEVARLRCLLVDIRGRIEGEIGAFPYQRPPPAAKNVDLVSGVDQGGFLAGAAAQVTSSCDFRCNDQMYCSPGMQGAVGGQVLGQGACDVSSIQCVGSTRSASTKLPVCGGMDAAPAACLPNVQNK

SEQ ID NO: 124 - protein, 304 aa, Glycine max
MNVKVHSSDDTKKDEEVVLPGFRFHPTDEELVGFYLQRKVDKKPLKIELIKQVDIYKYDPWDLPKVNSFGDKEWYFFCIRGRKYRNSVRPNRVTRSGFWKATGIDKSIYCVKEPHECIGLKKSLVYYRGSAGKGTKTDWMMHEFRLPPNAKSSPNDVQEAEVWTLCRIFKRIPSFKKYAPNLKDSTPATKPNPVNSNASTLDSDNCCKPYLICRDPMMMQQIERKPVIGQVDEKKHLFLGQFGPLSHLQAPSTTPYPNFWNQNNVEDHAFANENWDDLRSVVQFAIDPSTVFDCTETYIPPYFS

SEQ ID NO: 125 - protein, 614 aa, Glycine max
MMMFEDMGFCGDLDMLCGSLGDGDIAVRQTEPDPVVEDDYSDEEIDVDELEKRMWRDKMRLKRLKEQTKSKEGTDAAKQRQSQEQARRKKMSRAQDGILKYMLKMMEVCKAQGFVYGIIPEKGKPVTGASDNLREWWKDKVRFDRNGPAAIAKYQADNAIPGKNDGCNSIGPTPHTLQELQDTTLGSLLSALMQHCDPPQRRFPLEKGVPPPWWPTGNEEWWPQIGLPKDQGPPPYKKPHDLKKAWKVGVLTAVIKHMSPDIAKIRKLVRQSKCLQDKMTAKESATWLAIINQEEALARELYPDYCPPFSSAVANGSMVINDCSEYDVDGAEEEPNFDVEDRKPDHLHPSNLGMERMMGRMPIQQPSHPMKGDVVTNLDFIRKRKISSDFNMMMDQKIYTCEHPQCPYSEVRLGFHDRSARDNHQLNCAYRNSSADYGGGPNFHATEVKPVIFPQSFVQPNTTAQSASLVAPSFDLTGLGVPEDGQKMISDLMTIYDTNVVGNKNLSSTNCVTAENHNLSQASLQRQDSFFPGQGMVLEGNLFAREEGQFDRFKATMNMNMNMNTPFDTNHNNNNIHLMFNSPCDLSSFDFKEDIQGVGMDSLQKQQEVSIWYQ

SEQ ID NO: 126 - protein, 281 aa, Arabidopsis thaliana
MDPPLVNDSSFSAANPSSYTLSEIWPFPVNDAVRSGLRLAVNSGRVFTRSEHSGNKDVSAAEESTVTDLTAGWGSRKTRDLNSEDDSSKMVSSSSSGNELKESGDKKRKLCGSESGNGDGSMRPEGETSSGGGGSKATEQKNKPEPPKDYIHVRARRGQATDRHSLAERARREKISEKMTALQDIIPGCNKIIGKALVLDEIINYIQSLQRQVEFLSMKLEVVNSGASTGPTIGVFPSGDLGTLPIDVHRTIYEQQEANETRVSQPEWLHMQVDGNFNRTT

SEQ ID NO: 127 - protein, 85 aa, Zea mays
MSASRSSSPNSISQWSQKENKMFEEALAYYGEGTSNRWDKVSRAMGGIKSAEEVRCHYEDLDYDVKMIESGHVPYPKYKTHGFWT

SEQ ID NO: 128 - protein, 204 aa, Lycopersicon esculentum
MARAQQRYRGVRQRHWGSWVSEIRHPLLKTRIWLGTFETAEDAARAYDEAARLMCGPRARTNFPYNPNMPQTSSSKLLSTTLTAKLHKCYMASLQMTKTSPQGQKLAKNATNVQESVINSYKMKQQMLVPKPSVLLTHHDHHEEAKVVNLGVGVIRKVEDQVLEGIPQFVKPLEDDHIEQMIEELLDYGSIELCSNVVPSHQIQ

SEQ ID NO: 129 - protein, 204 aa, Lycopersicon esculentum; identical to SEQ ID NO: 128

SEQ ID NO: 130 - protein, 204 aa, Lycopersicon esculentum; identical to SEQ ID NO: 128

SEQ ID NO: 131 - protein, 204 aa, Lycopersicon esculentum; identical to SEQ ID NO: 128

SEQ ID NO: 132 - protein, 204 aa, Lycopersicon esculentum; identical to SEQ ID NO: 128

SEQ ID NO: 133 - protein, 185 aa, Zea mays
MEDGSAPRRSTPPTRRSRSAEFHNFSERRRRDKINEKLKALQELLPNCNKTDKVSMLDEAIDYLKSLQLQLQMLVMGKGMSPVVPLELQQYMHYITADPAQLPPLRPSGQQHRQFQITQANPQRQSNVESDFLSQMQNLHSSEPPQNFLRPPKLQLYTPEQRGGLPSTSHNTGWISGSSSYNFME

SEQ ID NO: 134 - protein, 349 aa, Glycine max
MSGEARSCDYCGHSTALLYCRADSAKLCFSCDREVHSTNQLFSKHTRTLLCDACDHSPATILCSTDTSVLCQNCDWEKHNPALSDSLHERRPLEGFTGCPSVSELLSIVGFSDLSKKSLLSSPQGSGADGIFGGEIEGLSDLFVWDSPSFVTLDDLISSSPSSHSFQAMEVPPLPKNRKAACGQHKEEILSQLRELAKSEPLDLEPYVSSGNLSSGFEREPEADIFPSHEWHRESSEPMYQVVPPDPLMRTYTEEIPFKHSTSAVGETQTYGDNGGKPSISLKSETLSTTPKAAACELTSQERDSALLRYKQKKKTRRFDKHIRYESRKVRAESRVRVKGRFAKMEHEH

SEQ ID NO: 135 - protein, 185 aa, Zea mays; identical to SEQ ID NO: 133

SEQ ID NO: 136 - protein, 185 aa, Zea mays; identical to SEQ ID NO: 133

SEQ ID NO: 137 - protein, 584 aa, Zea mays
MALTDATAFPYGLRVLVVDDDPTWLKILEKMLRKCSYEVTTCGLASVAIQILRERRNKFDIVISDVNMPDMDGFKLLELIGLEMDLPVIMMSIDGETSRVMKGVQHGACDYLLKPVRMKELRNIWQHVYRKKMHEVKEIEGNDSYDDLQMFRNGVEGFDERDLFMRADSDTMRKRKDVNKDHADQDSSDGATVKKARVVWSVDLHQKFVNAVNQIGFDKVGPKKILDLMNVPGLTRENVASHLQKYRLYLSRLQKQNEERIMGAARQDFNQKGPSDHLNLRSSFQEQPGNLSNGCQHSSQKVEAQTNILDPHLDDTKTSMPLKVPDKNGISASDAVDPQNITTASPLSGVFSFERMPVNQDRKLSETMILECQSWIGSVPPKQFMQYPKHNHERCDLLGDYSCLPKPDLEHPIAPGHLYAPPPVISMSYNVEEDVRDFSDVKPDLLGCMKSLSPALTCTVESVSAQLSDSVVTSTNSDRKFSSVEGLSSIKDCDFDQERNGAILFTSEEASILCGTDFTCLPEDLSGYQLQGVSFGNKGLNSIDLYQCNDTMLIPGLQNNWYDDDVEFSSETVEFPLLDGGLFA

SEQ ID NO: 138 - protein, 188 aa, Glycine max
MRSSNGASSSRASNANTGRHPVYRGVRRRSSGKWVSEIREPKKPNRIWLGTFATPEMAAIAYDVAALALKGKDAELNFPNSASSLPVPTSSAARDIQMAAASAAAAVGAANDALEGSRGGNASVSLTEEFSGGNLNHFVDEDLIFDMPNILVNMAEGMLLSPPRFDNFAATDYEYMDEDPNLWGFPNY

SEQ ID NO: 139 - protein, 185 aa, Zea mays; identical to SEQ ID NO: 133

SEQ ID NO: 140 - protein, 718 aa, Zea mays
MEVNSSGEETVIKVRKPYTITKQRERWTEAEHKRFLEALKLYGRAWQRIEEHVGTKTAVQIRSHAQKFFTKLEKEAINNGTSPGQAHDIDIPPPRPKRKANSPYPRKSGLSSETPTKELPSDKSTKPNMPLSNENVLMAGDASLQKFQRKELSGKESCSEVLNLFRDAPSPSFSSVNKSSSNHGAPIEASKTKIRDMTIMENSSLNPNMQEDVKEINDQEMERLNGTQISSKCEHSHEGYLDISMQQMKLKPESVETTYVDKQTARASHSLAERTGTTSIPVTATEETHSVLTSDQVGINGSMNPSIHPMFPADPKFDSSATPQPFPHNYAAFAPMMQCNCNQDTHRSLVNMSSTFSSMLVSTLLSNPAIHAAARLAASYWPAAEGNTPIDPNQENLADGVQGRSIGSPPSMASIVAATVAAASAWWATQGLLPFFAPPMAFSFVPAPSAAFPTVDVPRPSEKDRDCPAENAQKECQEARKQGQFEGFRVAASSEYDGSGKGEVSVHTELKISPVQNADATSAAGADTTDAFMNKKKQDRSSCGSNTPSSSDVDVDNVPEKEGNGNEKAKQASCSNSSAGDTNHRRFRSSGSTSDSWKEVSEEGRLAFHALFSREKLPQSFSPPQAEGSKEVGKEEEDEVTTVAVDLNKSTTSIDHDLDTIGEPRASFPNELSPLKLKLRRTGFKPYKRCSVEAKENRVPASDEVGTKRIRLDSEAST

SEQ ID NO: 141 - protein, 406 aa, Zea mays
MVPLCGFCGKQRSMIYCRSDAASLCLSCDRSVHSANALSRRHRRTLLCDRCGLQPASVRCLEDNTSLCQNCDWNGHDAASGASGHKRQAINCYSGCPSSAELSRIWSFIIDIPTVAAEPNCEDGLSMMTIDDSDVTNHHGASDDKRLLEIANTALMSDPPSPDKLKPLIGSSSGDGFDVLPLATDQPAGPVSATPKVPYARDDNKFNDGMYEDLCVDDADLTFENYEELFGTSHIRIEELFDDAGIDSYFEMKETPPFDFNEQPKIVQLQCSDVVPADCAMSNTGERADSSLCIPVRQVRSSISHPLSGLTGESSAGDHQDCGVSPILLMGEPPWYSPGPEGSLAGGSRDSALTRYKEKKKKRMFDKKIRYASRKARADVRKRVKGRFIKAGEAYDYDPLSQTRSY

SEQ ID NO: 142 - protein, 429 aa, Glycine max
MGRHSCCYKQKLRKGLWSPEEDEKLLNHITKHGHGCWSSVPKLAGLQRCGKSCRLRWINYLRPDLKRGAFSQQEENMIVELHAVLGNRWSQIAAQLPGRTDNEIKNLWNSCLKKKLRQRGIDPTTHKPLSEVENDKDMNMMPPSTDKSTQKASVGSNEVVSNLVDHHQPPKTMPNSSSERYPLEVSTTSSTQELFLDRFGTTTTTCHENNNNTSDLVGSYFSFQHLNYGTTTSMALSSNPNTSLCFILPSTSSDINNNNSIITSSSMLPSIFPTQHVKLQSNNNNPSSISSDGVQNWETSNNTNKNNGNMQLQSSTNYLDSTWGVAESMKIVNINKEAQVVPLQAEQEDLKWSEYLNTPFILGNNTTQNHQIQTSQSIYTEVIKPETGFIIDESCTSNWHHHQPPPAFQLSDIYSKDLQRFSVTFGQTL

SEQ ID NO: 143 - protein, 323 aa, Oryza sativa
MGRPPCCDKVGVKKGPWTPEEDLMLVSYIQEHGAGNWRAVPTNTGLMRCSKSCRLRWTNYLRPGIKRGNFTEQEEKLIVHLQALLGNRWAAIASYLPERTDNDIKNYWNTHLKKKLKKMQAAGGGEDSGAASEGGGGRGDGDGGGKSVKAAAPKGQWERRLQTDIHTARQALRDALSLDHPDPSPATAAAAATPAGSSAAYASSADNIARLLQGWMRPGGGGGGNGKGPEASGSTSTTATTQQQPQCSGEGAASASASASQSGAAAAATAQTPECSTETSKMATGGGAGGPAPAFSMLESWLLDDGGMGLMDVVPLGDPSEFF

SEQ ID NO: 144 - protein, 323 aa, Oryza sativa; identical to SEQ ID NO: 143

SEQ ID NO: 145 - protein, 68 aa, Zea mays
METVQECVSEFISFITGEASDKCQREKRKTINGDDLLWAMTTLGFEDYVEPLKHYLHKFREIEGERAA

SEQ ID NO: 146 - protein, 185 aa, Arabidopsis thaliana
MERERALFERVRKNSTVEEEVENEVEEEDESGVSITEEEKKKGVGSSGGRRGSSGGSGGVSPPSCQAERCGADLTDAKRYHRRHKVCEFHSKAPVVVVAGLRQRFCQQCSRFHDLAEFDESKRSCRRRLAGHNERRRKSNPEASNEGSTKGHHPKETTHCRLANERERIQMNLPGSSGYKSFNIR

SEQ ID NO: 147 - protein, 323 aa, Oryza sativa; identical to SEQ ID NO: 143

SEQ ID NO: 148 - protein, 841 aa, Arabidopsis thaliana
MELDDLDLSGSWPLDQITFASNFKSPVIFSSSEQPFSPLWSFSETSGDVGGELYSAAVAPTRFTDYSVLLASSESETTTKENNQVPSPSWGIMPLENPDSYCAIKAKMTQALRYFKESTGQQHVLAQVWAPVKNRGRYVLTTSGQPFVLGPNSNGLNQYRMVSLTYMFSLDGERDGELGLPGRVFRKKLPEWTPNVQYYSSKEFSRLGHALHYNVQGTLALPVFEPSRQLCVGVVELIMTSPKINYAPEVEKVCKALEAVNLKTSEILNHETTQICNEGRQNALAEILEILTVVCETYKLPLAQTWVPCRHRSVLAFGGGFKKSCSSFDGSCMGKVCMSTSDLAVYVVDAHVWGFRDACAEHHLQKGQGVAGRAFQSGNLCFCRDVTRFCKTDYPLVHYARMFKLTSCFAVCLKSTYTGDDEYVLEFFLPPAITDKSEQDCLLGSLLQTMKQHYSSLKVVSETELCENNMSLEVVEASEDGMVYSKLEPIRIHHPAQISKDYLELNAPEQKVSLNSDFMENNEVDDGVERFQTLDPIPEAKTVKKSERKRGKTEKTISLEVLQQYFAGSLKDAAKSLGVCPTTMKRICRQHGISRWPSRKINKVNRSLTRLKHVIDSVQGADGSLNLTSLSPRPWPHQIPPIDIQLAKNCPPTSTSPLSNLQDVKIENRDAEDSAGSSTSRASCKVNPICETRFRLPTHNQEPSRQVALDDSDSSSKNMTNFWAHLTCQDTASPTILQHKLVSIKATYREDIIRFKISPESVSITELKQQVAKRLKLETAAFELKYLDDDREWVSVSCDADLSECLDTSAAKANTLRLSVHDVTFNFGSSCESSEETMMCL

SEQ ID NO: 149 - protein, 424 aa, Glycine max
MSFRSIVRDVRDGFGSLSRRSFDVRISGGGKLNSLVHEAHERQLVIQNSRWASLPPELLCDVIKRLEESESTWPARKHVVACAAVCKSWREMCKEIVTSPEFCGKITFPVSLKQPGSRDGTIQCFIKRDKSNLTYHLFLCLSPALLVENGKFLLSAKRTRRTTCTEYIISMDADNISRSNSTYIGKLRSNFLGTKFIIYDTQPPYNNAQLSPPGRSRRFYSKKVSPKVPSGSYNIAQITYELNVLGTRGPRRMNCTMHSIPMSALEPGCTVPGQPELLPRSLEDSFRSISFARSIDNSTEFSSSRFSDIFVAGNEEEQGKGRPLVLKNKSPRWHEQLQCWCLNFRGRVTVASVKNFQLIAATQPPAAGAPTPSSQPAQSDHDKIILQFGKVGKDIFTMDYRYPLSAFQAFAICLTSFDTKLACE

SEQ ID NO: 150 - protein, 204 aa, Triticum aestivum
MRSSISTKRSRAAAIHNESERKRRDRINQKMQTLQKLVPNSSKTDKASMLDKVIDHLKQLQATVQMMNRMSSMMMPMAMPQLAQMSVMANMAQMAQMAQMGLGMMNMAGPLAQPAYPGLTQPMMQASTPFVAMQPWNAGAGADRQKQSAAVPDAYSAFLACQAAQQNTQQQQQAQPNGMEAYSRMMAMYQKLSQQQTRPGSSKE

SEQ ID NO: 151 - protein, 455 aa, Glycine max
MSNLTSASGEASASSGNRTEIGTDYSQQYFAPPLSQAQPPPLKKKRNLPGNPDPEAEVVALSPKTLLATNRFICEICNKGFQRDQNLQLHRRGHNLPWKLKQRSSNEIIRKKVYVCPEASCVHHDPSRALGDLTGIKKHFCRKHGEKKWKCDKCSKKYAVQSDWKAHSKTCGTREYRCDCGTLFSRRDSFITHRAFCDALAEESSRSVTGIGIVANSTSTQPTAAAASHQQDIIHGNSNNFSLKKEQQAGFRPPWIGQPSPSSASSFLVSHQENPNPRGGGPGPTLLPPYQTAPHMSATALLQKASQMGATMSKTGSMIGTHQQQAHVSANAALNLSSRDHQMTPTLHGLVPFGNKAVPAVGNGVSPSLLHHIIDSFSSPFEGTSFEDTFGGAGGDAMTKTTTADDGARGNNNEALTRDFLGLRPLSHTDILNIAGMGSCINSSQHNQTPNPWQG

SEQ ID NO: 152 - protein, 240 aa, Zea mays; identical to SEQ ID NO: 107

SEQ ID NO: 153 - protein, 202 aa, Glycine max
MARPQQRYRGVRQRHWGSWVSEIRHPILKTRIWLGTFETAEDAARAYDEAARLMCGARARTNFPFNPNVSHSSSSSSKLLSATLTAKLHRCYMASLQVTRQALASESQRTPPSVQNATTSTTTPISNNFSVKSEQTHAVLPHKRPEEEQESEANRGVKRVKAVENVPLQFKPLEEDHIEQMIEELLDYGSIELCSVISPQAL

SEQ ID NO: 154 - protein, 269 aa, Arabidopsis thaliana
MAMEWDNQLQPNNHHSSNLQGIDVNGGSGAGGGMYVKVMTDEQYETLRKQIAIYGTICERLVEMHKTLTAQQDLAGGRMGGLYADPMMSSLGHKMTARQRWTPTPVQLQILERIFDQGTGTPSKQKIKDITEELSQHGQIAEQNVYNWFQNRRARSKRKQHGGGSSGNNNGESEVETEVEALNEKRVVRPESLLGLPDGNSNNNGLGTTTATTTAPRPEDLCFQSPEISSDLHLLDVLSNPRDEHLVGKMGLAESYNLYDHVEDYGMSG

SEQ ID NO: 155 - protein, 505 aa, Glycine max
MASSSSNGSSSGSKSWDIDGDLAGFGYKVRSSELQHVAENMERLENVMDIVNSSTNNNISQLASDTVFYNPSDIGSWVDTLLSEFDQTASLPYDFSDFLDLDTDQNQNHKPTLVTMEEDSGIRLVHTLMTCADSVQRGDLAFAGSLIENMQGLLAHVNTNIGIGKVAGYFIDALRRRILGQGVFQTLSSSSYPYEDNVLYHHYYEACPYLKFAHFTANQAILEAFNGHDCVHVIDFNLMQGLQWPALIQALALRPGGPPLLRLTGIGPPSSDNRDTLREIGLRLAELARSVNVRFAFRGVAAWRLEDVKPWMLQVNPNEAVAVNSIMQLHRLLASDSDPIGSGIETVLGWIRSLNPKIISVVEQEANHNQDRFLERFTEALHYYSTVFDSLEACPVEPDKALAEMYLQREICNVVSSEGPARVERHEPLAKWRERLEKAGFKPLHLGSNAYKQASMLLTLFSAEGYSVEENQGCLTLGWHSRPLIAASAWQAAPMQDRETLRFEQ

SEQ ID NO: 156 - protein, 312 aa, Arabidopsis thaliana
MESVELTLKNSNMKDKTLTGGAQNGDDFSVDDLLDFSKEEEDDDVLVEDEAELKVQRKRGVSDENTLHRSNDFSTADFHTSGLSVPMDDIAELEWLSNFVDDSSFTPYSAPTNKPVWLTGNRRHLVQPVKEETCFKSQHPAVKTRPKRARTGVRVWSHGSQSLTDSSSSSTTSSSSSPRPSSPLWLASGQFLDEPMTKTQKKKKVWKNAGQTQTQTQTQTRQCGHCGVQKTPQWRAGPLGAKTLCNACGVRYKSGRLLPEYRPACSPTFSSELHSNHHSKVIEMRRKKETSDGAEETGLNQPVQTVQVVSSF

SEQ ID NO: 157 - protein, 669 aa, Zea mays
MLLGAAAARMEEKRVITGRERDQFPVGMRVLAVDDDPVCLKVLETLLRRCQYHVITTNQAITALKLLRENRDMFDLVISDVHMPDMDGFKLLELVGLEMDLPVIMLSVNGETKSVMKGITHGACDYLLKPVRIEELRNIWQHVVRRKFSKRERSNLDVYKDFNRLPGADPCHSHGHGHGQTTAGASDQSGRIGRKRKEMHSDEEDDGEENDFQEGDEPSAAKKPRVVWSIELHRKFVAAVNQLGIDKAVPKRILELMNVEKLTRENVASHLQKYRLYLKRLSAVASQQASIVAAFGGRDPFLHMGAFEGLQSYQPFAPCAALSSFIPHHGSLGRTTAAAFGVPELAPAITVQAAASNGMISHCAGDASKFQLSGIQENQQPNLGQGSATSLGLPQLQQKWIQQETGDLSTVFSGSALANTLSGALQRVASSPLPPQELLEGVQTKVSAQPPITMASVSSELVERTVGVSANLQDSGISPQGTLPINDGFTADKLQLQDPFDSNGGTNFSVNMPVCPSGSLAASSNAKGGASSCSPVLLAPDNGRHSNYLQFGVAGNSGHDMNDIKQDHLHQGLSTGGFNHDFGTCMTEQTDPNVPYLMPQIKPNTIASEDKLKQRNIYDLGIPKLHGGFSSSSCNFDGLLNSMVKAEKDDLSFTDSDLGCDFFPLGACI

SEQ ID NO: 158 - protein, 223 aa, Zea mays
MADSDNDSGGPSNAGGELSSPREQDRFLPIANVSRIMKKALPANAKISKDAKETVQECVSEFISFITGEASDKCQREKRKTINGDDLLWAMTTLGFEDYVEPLKHYLHKFREIEGERAAASAGASGSQQQQQQGELPRGAANAAGYAGYGAPGSGGMMMMMMGQPMYGGSQPQQQPPQPQPPQQHQQQHQQHHMAMGGRGGFGQQGGGGGSSSSSGLGRQDRA

SEQ ID NO: 159 - protein, 547 aa, Arabidopsis thaliana; identical to SEQ ID NO: 111

SEQ ID NO: 160 - protein, 185 aa, Zea mays
MAEAPASPGGGGGSHESGSPRGGGGGGSVREQDRFLPIANISRIMKKAIPANGKTIPANGKIAKDAKETVQECVSRFISFITREASDKCQREKRKTINGDDLLWAMATLGFEDYIEPLKVYLQKYREMEGDSKLTAKSSDGSIKKDALGHVGASSSAAQGMGQQGAYNQGMGYMQPQYHNGDISN

SEQ ID NO: 161 - protein, 185 aa, Zea mays
MAEAPASPGGGGGSHESGSPRGGGGGGSVREQDRFLPIANISRIMKKARPANGKTIPANGKIAKDAKETVQESVSEFISFITSEASDKSQREKRKTINGDDLLWAMATLGFEDYIEPLKVYLQKYREMEGDSKLTAKSSDGSIKKDALGHVGASSSAAQGMGQQGAYNQGMGYMQPQYHNGDISN

SEQ ID NO: 162 - protein, 185 aa, Zea mays
MAEAPASPGGGGGSHESGSPRGGGGGGSVREQDRFLPIANISRIMKKAIPANGKTIPANGKIAKDAKETVQESVSEFISFITSEASDKSQREKRKTINGDDRLWAMATLGFEDYIEPLKVYLQKYREMEGDSKLTAKSSDGSIKKDALGHVGASSSAAQGMGQQGAYNQGMGYMQPQYHNGDISN

SEQ ID NO: 163 - protein, 244 aa, Triticum aestivum
MGRGKVQLKRIENKINRQVTFSKRRSGLLKKAHEISVLCDAEVGLIIFSTKGKLYEFSTESCMDKILERYERYSYAEKVLVSSESEIQGNWCHEYRKLKAKVETIQKCQKHLMGEDLESLNLKELQQLEQQLESSLKHIRSRKNQLMHESISELQKKERSLQEENKVLQKELVEKQKAQAAQQDQTQPQTSSSSSSFMMRDAPPAAATSIHPAAAGERAGDAAVQPQAPPRTGLPLWMVSHING

SEQ ID NO: 164 - protein, 185 aa, Zea mays
MAEAPASPGGGGGSHESGSPRGGGGGGSVREQDRFLPIANISRIMKKAIPANGKTIPANGKIAKDAKETVQERVSEFISFITSEASDKSQREKRKTINGDDLLWAMATLGFEDYIEPLKVYLQKYREMEGDSKLTAKSSDGSIKKDALGHVGASSSAAQGMGQQGAYNQGMGYMQPQYHNGDISN

SEQ ID NO: 165 - protein, 185 aa, Zea mays
MAEAPASPGGGGGSHESGSPRGGGGGGSVREQDRFLPIANISRIMKKARPANGKTIPANGKIAKDAKETVQERVSEFISFITSEASDKSQREKRKTINGDDRLWAMATLGFEDYIEPLKVYLQKYREMEGDSKLTAKSSDGSIKKDALGHVGASSSAAQGMGQQGAYNQGMGYMQPQYHNGDISN

SEQ ID NO: 166 - protein, 188 aa, Glycine max; identical to SEQ ID NO: 138

SEQ ID NO: 167 - protein, 304 aa, Glycine max; identical to SEQ ID NO: 124

SEQ ID NO: 168 - protein, 614 aa, Glycine max; identical to SEQ ID NO: 125

SEQ ID NO: 169 - protein, 406 aa, Zea mays; identical to SEQ ID NO: 141

SEQ ID NO: 170 - protein, 429 aa, Glycine max; identical to SEQ ID NO: 142

SEQ ID NO: 171 - protein, 718 aa, Zea mays; identical to SEQ ID NO: 140

SEQ ID NO: 172 - protein, 281 aa, Arabidopsis thaliana; identical to SEQ ID NO: 126

SEQ ID NO: 173 - protein, 299 aa, Glycine max; identical to SEQ ID NO: 117

SEQ ID NO: 174 - protein, 255 aa, Zea mays
MGRGRVELKRIENKINRQVTFSKRRNGLLKKAYELSVLCDAGVALIIFSGRGKLYEFGSAGVTKTLERYQHFCYNAQDSNNGALSESQSWYQEISKLRAKFEALQRTQRHLLGEDLGPLSVKELQQLEKQLECALSQARQRKTQLMMEQVEELRRTERHLGEMNRQLKHKLEAEGCSNYTTLQHAACWPAPGGTIVEHDGATYQVHPPAHSVAMDCEPTLQIGYPHHQFPPPEAANNIPRSAATGENNFMLGWVL

SEQ ID NO: 175 - protein, 255 aa, Zea mays
MGRGRVELKRIENKINRQVTFSKRRNGLLKKAYELSVLCDAEVALIIFSSRGKLYEFGSAGITKTLERYQHCCYNAQDSNGALSETQSWYQEMSKLRAKFEALQRTQRHLLGEELGPLSVKELQQLEKQLECALSQARQRKTQLMMEQVEELRRKERHLGEMNRQLKHKLEAEGCSNYRTLQHAAWPAPGSTMVEHDGATYHVHPTTAQSVAMDCEPTLQIGYPPHHQFLPSEAANNIPRSPPGGENNFMLGWVL

SEQ ID NO: 176 - protein, 203 aa, Glycine max
MARGKVQLKRIENPVHRQVTFCKRRAGLLKKAKELSVLCDAEIGLFIFSAHGKLYELATKGTMQGLIERYMKFTRGAQPEAAAPEAHPLLVAKEETNALKQEIQTLQKGISYLFEGGNKTMAIDELQLLEKNLETWIYHIRSMKMNIMLQEIQALKDKEGTLKAANKYLHDKIVENTAISNFAEFATDTSYPLIVQDGGFQLY

SEQ ID NO: 177 - protein, 396 aa, Arabidopsis thaliana
MSLFCNSIETLYPKPFLSHKSHFFTFSNSKFQNPKFTSFPLRHQWRIESCLKSASSSEIDMVRNKEGIFAPKEKKVVVLWDLDNKPPRGPPYEAATALRKVAEKLGRVVEISAYANRHAFIHLPHWVVEERRERRNLDFMERKGEVTPIDPYICGVCGRKCKTNLDLKKHFKQLHERERQKKVNRMRSLKGKKRQKFKERYVSGNEKYNEAARSLLTPKVGYGLEAELRRAGVYVKTVEDKPQAADWAVKRQIQHSMTRGIDWLVLVSDDKDFSDMLRKAREADLGTLVVSDMDRALGRHADLWVPWSGVEKGEIGEKDLIPGKRPRFEEDEVGFGGNDELFSLSYDEDEKAEMTVESDGFGRFNVSAFSEDEWVEDEGDFVLSDSSDDDSDDELF

SEQ ID NO: 178 - protein, 548 aa, Glycine max
MQTSKKHPTSAGIHLYLQPAQDIDPYTHYQILQSNSCHDNSSSQGTTISFETSKEQYFTLESSPAINDLIGCDSPSYASVSSNRSPFSPQASHSDQHQSSDNTYGSPTSAHSRYDDDGYELKNKLRELEISLLGPDSDIVDSWHCSYKGGRHRASSPTAKHNWDQIVEMIPKLDLKEVLIRCAQAVADDDIETAVGFMNNVLAKMVSVGGDPIQRLGAYMLEGLRARLESSGSIIYKALKCEQPTSNDLMTYMHILYQICPYWKFAYTSANAVIGEAMLNESRIHIIDFQVAQGTQWLLLIQALASRPGGAPFIRVTGVDDSQSFHARGGGLHIVGKRLSDYAKSCGVPFEFHSAAMCGSELELENLVIQPGEALVVNFPFVLHHMPDESVSTENHRDRLLRLVKSLSPKVVTLVEQESNTNTSPFFQRFVETLSYYTAMFESIDVALPRDDKQRINAEQHCVARDIVNMVACEGDERLERHELLGKWRSRFSMAGFAPCPLSSSVTAAVRNMLNEFNENYRLQHRDGALYLGWKSRAMCTSSAWRCY

SEQ ID NO: 179 - protein, 396 aa, Arabidopsis thaliana; identical to SEQ ID NO: 177

SEQ ID NO: 180 - protein, 193 aa, Arabidopsis thaliana
MDISAQRFAMNGRSMRLPPGFRFDPDDEDLVFEYLAKKVLHRPMDFDLPELRSCNVDPWDLLGEKNKEVYYFVKKEERERKGRETLSGYWEECEEEEVMEAGGRDCIHLEGRRKTFAFFIGKKPRGTITPWIMYEFRLLSSRATRWSSSPLPRGEVGKWRAVKVVVKEENDEEMVEDEHESDESDGEEVIQSR

SEQ ID NO: 181 - protein, 187 aa, Glycine max
MAKEGLGLEITELRLGLPDAEHVTVVNKNEKKRAFSQIDDENSSSGGDRKIKTNKSQVVGWPPVCSYRKKNSMNEGSKMYVKVSMDGAPFLRKIDLGLHKGYSDLALALDKLFGSYGMVEALKNADNSEHVPIYEDKDGDWMLVGDVPWEMFMESCKRLRIMKRSDAKGFGLQPKGSLKGFIESAAK

SEQ ID NO: 182 - protein, 275 aa, Arabidopsis thaliana
MANASPLSPTNQHFFQPLLPGFQSNLKIPVNYFSEHIEGKHEGKTVTLRTDASERTWEVKMEGHRLTEGWKEFVEAHDLRIGDFVVFRHEGDMVFHVTALGPSCCEIQYPQSSRHEEGEESGENEISEKEGEENVQKESDKSSSDLNCFSQSVTHSNISRDAVSVPRDFVKRSGFSKGRHEIVLMNEEGKSWESEVKSYMSGAVYLVGGWTTFCTENKLDVGDSCTFKLLQKAKTPVFQLCSRTKVESMNITGESKFVKLTPTPSSLALGKSIYR

SEQ ID NO: 183 - protein, 276 aa, Zea mays
MLLNPASETSVLDTIRQHLLEEPAAAEARPADESFGSLVADQWSGSLPFRTDDADDMVVFGVLQDAFAYGWLPDGSFVHVKPEPVRSPDSSSYHPCSYDGSPCFGLLDPEPPLTPGTTTPGRGQEEAAAAMARGKHYRGVRQRPWGKFAAEIRDPARNGARVWLGTYDTAEDAALAYDRAAYRMRGSRALLNFPLRIGSGDKRPSPAPPEPATSSDSSSSASGSHKRRKRGEAAAANMAMALVPPPSQLNRPPQPWFPAAPVEQAAMAPRVEQIVV

SEQ ID NO: 184 - protein, 193 aa, Arabidopsis thaliana; identical to SEQ ID NO: 180

SEQ ID NO: 185 - protein, 843 aa, Glycine max
MASSEVTMKGNCLNHNDGGATEPHSPSTAKDAEAALFRELWHACAGPLVTVPREKERVFYFPQGHIEQVEASTNQVADQHMPVYDLPPKILCRVINVQLKAEPDTDEVFAQVTLLPEPNQDENAVEKEPPPPPPPRFHVHSFCKTLTASDTSTHGGFSVLRRHADECLPPLDMSKQPPTQELVAKDLHANEWRFKHIFRGQPRRHLLQSGWSVFVSSKRLVAGDAFIFLRGENGELRVGVRRAMRQQGNVPSSVISSHSMHLGVLATAWHAILTGTIFTVYYKPRTSPAEFIVPYDQYMESLKNSYSIGMRFKMRFEGEEAPEQRFTGTVVGIEDSDPKRWRDSKWRCLKVRWDETSNTPRPERVSPWKIEPALAPPALNPLSMPRPKRPRSNAVPSSPDSSVLTREASSKVSIDPSPANGFPRVLQGQEFSTLRGNFTESNEFDTAEKSVVWPPTAVDDEKMDVSTSRRYGSESWMSMGRNEPTYSDLLSGFGTSGDPSHSSLKDQMSPAYSARKQSLDHEGKLHMPHPWPVMPSSLSLNILDSNAKGPTHGGDTSFQARGNLRFSAFGEYPALHGHKVEDSHGNLMPPPPAPQTQYQSPCSRELMSKHVSAKTCEAVKPKDGDCKLFGFSLISGPIVPEPSLSQRNVSEPAGQMHLTAHQQRTSENDEKSDHSKGSRPVDDLVVDDHDRPLQTSQSHTKDVQAKPLSGSARSCTKVHKKGIALGRSVDLTKYSGYDELVAELDQLFEFGGELLSTKKDWLIVYTDNEGDMMLVGDDPWQEFCAMVCKIYIYPKEEIQKMSPGTLSSKNEENQSVMASDGADAKVVKCQPHQKFNSENGLDA

SEQ ID NO: 186 - protein, 202 aa, Glycine max; identical to SEQ ID NO: 153

SEQ ID NO: 187 - protein, 243 aa, Zea mays
MNELDLNTAALDPDHYATGLRVLLQKELRNSDVSQLGRIVLPKKEAESYLPILMAKDGKSLCMHDLLNSQLWTFKYRYWFNNKSRMYVLENTGDYVKAHDLQQGDFIVIYKDDENNRFVIGAKKAGDEQTATVPQVHEHMHISAALPAPQAFHDYAGPVAAEAGMLAIVPQGDEIFDGILNSLPEIPVANVRYSDFFDPFGDSMDMANPLSSSNNPSVNLATHFHDERIGSCSFPYPKSGPQM

SEQ ID NO: 188 - protein, 234 aa, Lycopersicon esculentum
MDQQLPPTNFPVDFPVYRRNSSFSRLIPCLTEKWGDLPLKVDDSEDMVIYGLLKDALSVGWSPFNFTAGEVKSEPREEIESSLEFSPSPAETTAAPAAETPKGRHYRGVRQRPWGKFAAEIRDPAKNGARVWLGTYETAEEAAIAYDKAAYRMRGSKAHLNFPHRIGLNEPEPVRVTAKRRASPEPASSSGNGSMKRRRKAVQKCDGEMASRSSVMQVECQIEQLTGVHQLLVI

SEQ ID NO: 189 - protein, 518 aa, Zea mays
MLPPFGNPLWVPEDVDDQQQHHAPPPTPMGLGPGQGHDEQNLLALASAAAMGAGGIFSSPAVLDDDWYFDPVAAAAAAGAQGQLLLAPPGPAPDAGSQMFSLFNVGGAATFDVHGFDLGLGGGGGGDLVPFAGAGNASNSASFSLVPAGNAGGFLGSFGGFGTAPAQMPDFGGLGGFDMFNSGAGSSSAAPPPPASVSLTAPFSGRGKAAVLRPLEIFPPVGAQPTLFQKRALRRNAGEEDDDKKRKVEAVAAAAGASSGGGGDTVLDDADDDDGGSIDASGLNYDSEDARGVEDSGKKDGKDSNANSTVTGGATGDGKGKRKGLPAKNLMAERRRRKKLNDRLYMLRSVVPKISKMDRASILGDAIEYLKELLQKINDLQNDLESSPSTASLPPTPTSFHPLTPTLPTLPSRVKEELCPSALPSPTSQQPRVEVRMREGRAVNIHMLCARRPGLLLSAMRAIEGLGLDVQQAVISCFNGFSLDIFKAELCKEGPGLLPEEIKSVLLQSAGFHGGVMP

SEQ ID NO: 190 - protein, 187 aa, Glycine max; identical to SEQ ID NO: 181

SEQ ID NO: 191 - protein, 234 aa, Lycopersicon esculentum; identical to SEQ ID NO: 188

SEQ ID NO: 192 - protein, 234 aa, Lycopersicon esculentum
MDQQLPPTNFPVDFPVYRRNSSFSRLIPCLTEKWGDLPLKVDDSEDMVIYGLLKDALSVGWSPFNFTAGEVKSEPREEIESSLEFSPSPAETTAAPATETPKGRHYRGVKQRPWGKFAAEIRDPAKNGARVWLGTYETAEEAAIAYDKAAYRMRGSKAHLNFPHRIGLNEPEPVRVTAKRRASPEPASSSGNGSMKRRRKAVQKCDGEMASRSSVMQVECQIEQLTGVHQLLVI

SEQ ID NO: 193 - protein, 234 aa, Lycopersicon esculentum; identical to SEQ ID NO: 188

SEQ ID NO: 194 - protein, 231 aa, Brassica napus
  misc_feature (106)..(106): Xaa can be any naturally occurring amino acid
MGRGKIEIKRIENSTNRQVTFCKRRNGLLKKAYELSVLCDAEVALIVFSTRGRLYEYANNNIRSTIERYKKASDNTNTHSVQEINAAYYQQESAKLRQQIQTIQNXSNRHLMGDSLSALSVKELKQVENRLEKAISRIRSKKHELLLAEIENLHKREIKLDNESIYLRTKIAEVERFQQHHHQMVSGTEMTAIEALASRNYFAHNIMTIGSGSGAGHGCSYFDPDKKTHLG

SEQ ID NO: 195 - protein, 245 aa, Eucalyptus grandis
  misc_feature (151)..(151): Xaa can be any naturally occurring amino acid
MGRGKVELKRIENKINRQVTFAKRRNGLLKKAYELSVLCDAEVALIIFSNRGKLYEFCSSSSMMKTIEKYQKCSYGSLETNCSINEMQNSYQDYLKLKARVEVLQRSQRNPPWEELGPLNSKELEQLEHQLENSLKQIRSAKTQFMFDQLXHLQHKEQMLVEANRELWKKLEESNTRIPLRLGWEAEDHNNISYSRLPTQSQGLIFQPLGGNPTLQIGYNPAGSNELNVSAADQHPNGFIPGWML

SEQ ID NO: 196 - protein, 783 aa, Ipomoea nil
MAAKAFPMVGDAANVSGGATSSREYHLNDSHHNILPLHSSSSSASPSSHLALLCDNAKMVRKRAASEMELQIGGGISEHGRFLRRNAPLLGDLRVCGTNFGGGAGGDNGGGNSLGVSVSHPNHVVVNNYSTMQIAPPPTSTNLSVTSTSDATHLAYMEQLPPNEPQAPLPLCVFSGLPLFPAPSRARNAAGAALQPAPLPVTASGSAIGVNSSSGGGMGDNGTAMAWIDGIIKDLIHISTHVSIPQLIQNVREIIHPCNPNLAALLEYRLRSLTTAAAAADPLAANVYDDWRRKETLQPQSQDAITHPLHLPDSMTPPPWEITLPPAAAAATTRHQLRDNNPSSLPFVPVPSSDRLDQQQQPGRMDNEKQPESQSQSQSPPASENTAAAALIRTESIMRREKEELEQQKKDEEGLHLLTLLLQCAEAVAADNLDEANRMLLQVSELSTPYGTSAQRVAAYFSEAMSARLVNSCLGIYASAPLNALPLSLNQKMASAFQVFNGISPFVKFSHFTANQAIQEAFEREDRVHIIDLDIMQGLQWPGLFHILASRPGGPPLVRLTGLGTSMEALEATGKRLSDFAQKLGLPFEFFPVADKVGNLDPQRLNVNKREAVAVHWLQHSLYDVTGSDTNTLWLLQRLAPKVVTVVEQDLSHAGSFLGRFVEAIHYYSALFDSLGACYGEESEERHAVEQQLLSREIRNVLAVGGPSRSGEVKFNNWREKFQQSGFRGVSLAGNAAAQATLLLGMFHSDGYTLAEDNGALKLGWKDLCLLTASAWRPPPLAQ

SEQ ID NO: 197 - protein, 394 aa, Zea mays
EATAATVTALARGEARKREAMATGGGSSRSDDVRGLKFGKKIYFEQDGGSGSGAGAVGGRKGKGVATGGARPASAASAAQPPRCQVDGCGVDLSAVKQYYCRHKVCNMHSKEPRVFVAGIEQRFCQQCSRFHQLHEFDQGKRSCRRRLIGHNERRRKPPPGPLTSRYGRLAASLQEPGRFRSFLLDFSYPRVPSSVRDAWPGIQHGGDRMLGTVQWHGHQEPPHPHRSAAAGYGNHAAYNCHGGLVAGGAPMLSSAAFELPPGGCVAGVAADSSLCSLSSVNSAMGHDLPTTTGPQQCPRPAPSTAPRWRRPSWRAATRRRAPGRARGTPLPTAPGTRSVSTMLCTWSTQAPRRSTSPASSSSPCREAAGRHTCRASTMAAPAAAPSTIPPPAR

SEQ ID NO: 198 - protein, 278 aa, Arabidopsis thaliana
MNIVSWKDANDEVAGGATTRREREVKEDQEETEVRATSGKTVIKKQPTSISSSSSSWMKSKDPRIVRVSRAFGGKDRHSKVCTLRGLRDRRVRLSVPTAIQLYDLQERLGVDQPSKAVDWLLDAAKEEIDELPPLPISPENFSIFNHHQSFLNLGQRPGQDPTQLGFKINGCVQKSTTTSREENDREKGENDVVYTNNHHVGSYGTYHNLEHHHHHHQHLSLQADYHSHQLHSLVPFPSQILVCPMTTSPTTTTIQSLFPSSSSAGSGTMETLDPRQM

SEQ ID NO: 199 - protein, 336 aa, Triticum aestivum
MEFAGEADDFALDLIREHLLGGDGGVLATANHEQGPFCDDVTFPVLPPSAAEPQAYQQPMFFPQQGQRQEQTQGYMGLTHQYVNSYPAATAVFRAPEPVMIQFGGQPSPVRALSSTLTISVPPQGTFGWAGTAAAAAPAPAPVEDLRKYRGVRQRPWGKYAAEIRDPKRRGYREWLGTYDTSVEAARAYDRAAFRMRGAKAILNFPNEVGTRGAELWARPPAGPASQAAGATNKRKRSQGEDADVEVTGVVINKAVRAEAPSPSSARVSWDTPSSLSRGTASSTVTSVATTPEGEFPPTPSSSGWEQCWEALMGGMPLLSPLSPHPALGFPQLSVS

SEQ ID NO: 200 - protein, 240 aa, Papaver somniferum
VQLRRMENKINRQVTFSKRRSGLLRPCAEMSVLCDAEVALIVFSTKGKLFEYSTDSGMDRILERYERYSYAERELVTTEIDQGNWSLEYSKLKSKIEILQKNQRHFMGEDLQSMSLKELQNLEQQLDVALKQIRSRKNQLMYESISELQKKEKALQEQNNKLGKQLKEKEKEVAAQQQQASQFSQGQSSPSFLLSQSLPSLNIGSGSYQARGGDNGNEEGNRTQTTRTNTATLMPPWMLN

SEQ ID NO: 201 - protein, 342 aa, Glycine max
MDRGDQMALSGSYYMQQRGIPGSGAPPELHISPNMRPISNPNLPFQSSIGGGTIGSTLPLESSAISAHGVNVGAPTGAPPGEPVKRKRGRPRKYGTDGSVSLALTPTPTSSSYPGALTQSQKRGRGRPPGTGKKQQLASLGELMSGSAGMGFTPHIINIASGEDITTKIMAFSQQGARAVCILSANGAVSTVTLRQPSTSGGTVTYEGRFEIVCLSGSYLVTDNGGSRNRTGGLSVSLASPDGRVIGGGVGGVLIASSPVQVVVGSFLWGGSKTKNKKKESSEGSEVAVESDHQGVHNPVSLNSSISPNQNLPPTPPSLNPWSTSRPLDMRNSHVDIDLMRG

SEQ ID NO: 202 - protein, 229 aa, Cucumis melo
MSSSKEQSPSPETESSSSSSSDSNKKPKRINSNSSSNSKHAVYRGVRMRNWGKWVSEIREPRKKSRIWLGTFPSPEMAARAHDVAALSIKGNSAILNFPDLVHLLPRPVSLAPRDVQAAAAKAAHMHNLSSNANTNNHNTNSNSSSAFSDELSEIVELPALGTSYDGGVGVGGEFVFVESELESAAWLYQPPWVQSLQEDYDDIDGDGDCGKLGMGFVSNGFKGFLFDY

SEQ ID NO: 203 - protein, 752 aa, Chlamydomonas reinhardtii
MDKAERAAGGPNAASEDDWLLEFWPEPAADFPAPVAPMLSQHQDAAQLPEAMPQQQGLALGGYGLTQQPSDFMQTGMPGFDAFSSGKAATLGLPLLADPQRASTDGASALMNAAQQSSEYMLAPGMGGMPHLLAPSVGTALPGTGHTGFADLSMGGMAGGIPGLGGPGIMHGQYFMQPQRAATGPAKSRLRWTPELHNRFVNAVNSLGGPDKATPKGILKLMGVDGLTIYHIKSHLQKYRLNIRLPGESGLAGDSADGSDGERSDGEGGVRRATSLERADTMSGMAGGAAAALGRAGGTPGGALISPGLAGGTSSTGGMAAGGGGGGGLVTEPSISRGTVLNAAGAVATAAPAAAAPAGGSAAVKRPAGTSLSSGSTASATRRNLEEALLFQMELQKKLHEQLETQRQLQLSLEAHGRYIASLMEQEGLTSRLPELSGGAPAAAPVAAGGAAGGMIAPPPPQQQLQHQPQLLQPQGSLPAGGSSEAHAAAGAGTMVVHQQQQQHVHHHHQQQQVQMQQHARHCDTCGAGGAGGAPSGGSSMQQLQAAEQQRTELVVAGRLGSMPAPASSSPLAGQAHQQQPLAGGAAHLVHVHSHTPGGQPHVQHQDAFAGAATAAAHASPGLPQSHSHLLPADLSSNAGPDTSAGQIKPEPDMSQQQQQQEQQEAEQLAQGLLNDSSAGAGAVSGSDGGGLGDFDFGDFGDLDGGAQGGLLGPGDLIGIAELEAAAAHEQQQEQEHDPLDADRAKRQRVEP

SEQ ID NO: 204 - protein, 165 aa, Cucumis melo
MELPVEEDNDDEFSPLNLIRYHLLQDSHSFSTLRDFGFKLEFEDFEYVKPSEEEEEEPPIQSPKRHPERQSPRSSSPDGGRRYRGVRRRPWGKFAAEIRDPSRKGSRVWLGTFDSDVDAARAYDSAAFKIRGRKAKLNFPLDAGKSDPPPGNGRKKKRRETNLNA

SEQ ID NO: 205 - protein, 292 aa, Arabidopsis thaliana
  misc_feature (228)..(228): Xaa can be any naturally occurring amino acid
MQEAALGMMGASVGGDGDAAVVAEQNRQLKGEIATHPMYEQLLAAHVACLRVATPIDQLPIIEAQLSQSHHLLRSYASTAVGYHHDRHELDNFLAQYVMVLCSFKEQLQQHVRVHAVEAVMACREIENNLHSLTGATLGEGSGATMSEDEDDLPMDFSSDNSGVDFSGGHDMTGFGPLLPTESEKSLMERVRQELKLELKQGFKSRIEDVREEIMRKRRAGKLPGDTXTTVLKNWWQQHCKWPYPTEDDKAKLVEETGLQLKQINNWFINQRKRNWHNNSHSLTSLKSKRKH

SEQ ID NO: 206 - protein, 273 aa, Cucumis melo
MCGGAIIADLIPRRDGQRVTASDIWPNSSFFHFNKIRSDQVSTPLKRTPLPASSEASKPKKRQRKNLYRGIRQRPWGKWAAEIRDPRKGIRVWLGTFNTAEEAARAYDREARKIRGKKAKVNFPNEDDAYSIQAPIPQFHPHLYTVPENSEFPYDLNQIGDFTGTHFPVAIEEQSGSGSEDSYSPPKRFGVKEAEDQKPEQKVSVIAAAEEENEVQKLSEELMAYENYMKFYQIPYLDGQSTVTNPAEEQVVGDLWSFDDEDGLHGSVSSSEL

SEQ ID NO: 207 - protein, 247 aa, Ipomoea nil
MEFQSDQSREMSPQRKMGRGKIEIKRIENTTNRQVTFCKRRNGLLKKAYELSVLCDAEVALIVFSSRGRLYEYANNSVKATIDRYKKACSDSTNTGSISEANTQFYQQEANKLRQQISNLQNQNRNYMGEGLGGFNLRDLKNLESKIEKGISKIRAKKNELLFAEIDYMQKRQEIDLHNNNQYLRAKIIETERAQQQQQQMNLMPGSSSYHELAPPQQFDARNYLQLDGFQSTSSYSKQDHLPLQLV

SEQ ID NO: 208 - protein, 230 aa, Beta vulgaris
  misc_feature (199)..(199): Xaa can be any naturally occurring amino acid
  misc_feature (212)..(212): Xaa can be any naturally occurring amino acid
MGRGKIEIKRIENTTNRQVTFCKRRNGLLKKAYELSVLCDAEVALIVFSSRGRLYEYANHSVKGTIDRYKKACSNQSGAGSVAEANAQYYQQEAAKLRNQIRTATENNRLLSRHMMGEGLSSLSMKELKNLETKLERGISRIRSKKNELLFAEIEFMQKREIELHNNNQFLRARISENERAQQSMSLMPGGSDYDLVPXQSFDSRNYFQVNXLQPSSQYARQDQTPLQLV

SEQ ID NO: 209 - protein, 244 aa, Ipomoea nil
MEFPNQALEEEESSHRKSGRGKIEIKRIENTTNRQVTFCKRRNGLLKKAYELSVLCDAEVALIVFSTRGRLYEYANNSVRATIDRYKKHHSDSTNTGSVSEANTQFYQQESAKLRRQIREIQTSNKQILGESLGVLNHKELKNLEGKVEKAIGRVRSKKNELLFSEIELMQKREIELQNANMYLRAKISEFERAQQQMNLMPGSEYQETMTTSQTYDAHNFLPLTLLEPNQHYSRHDQTALQLV

SEQ ID NO: 210 - protein, 1196 aa, Chlamydomonas reinhardtii
MNTGMAYNNGGELKQRLSRALLDVSGTLATVKSGALVQVWMPECTHDGTIVLSCQGLPFAVAGVGDLLALFRCVSVRYRFSTDVMKPSLMGAIGRVYSTLEPEMSHNVQKYDKQVYLRVSEAQRCRVHSTLIIPIFGSDARDTPLAVFELVQGDRDVTFPAVLSQLSASLQNVNLFTIDLETAATAAGLRKWPMHIDMLPASEFSSGAAGTAAGAAGGTAAAGSGPARLSPNGEGQGLHRRLGSARLADVAEDKEPAASSNVIATEEREHQSPSTSRQDEVGSWGAKRTSLTRVSTGNLHGAGGGAAGSGPVHMPTAAGGGATAGAGGIKLSSSPQTMQGPLAAAGTSPPGAGAGTGVPSVALSMPVPVPVQGMSQLTASGSGHAAGPGGAAAGLAGAGGSGLLPGSAPALLKLETAGSAGTSDGLGARQAMTPPAPVPGPPLDPNNAAQLMAWLSQQGNAGNAALDQIKALLEQQQQQQQQQQQQQQQQQQMQLQQQLQQLQALQQQQMQQQAQSQALQVRQARMSESMSVPGALAAQQLQLQQQQQQQQAPHQHQQGPMMMDVTVGSSGPLQHLAGAAVSTPSPPTTGSGLAQACSGDTNANAAGPNTLVAAVAAAAAAEQQQQQQQQAAAQMQQAAIQQAVAQASTAAAAAASMNNKLSRSGSAPRVQAAAAGAAAGDAGDDGDEEDISSGGDDDDSDDERGGGGNPRNNNRVGGGAGKRLRFEDLQAQFGLGLKEAANNLGICATTLKRACRRHGIKRWPRRQIAKLSKALNQMGYQGAPPPGLVQNAVINGVGPGGTATTATKPKPKPKPDPVALQHATQMLLAQQQAALVAAAAANGGNMAAFPSIAAAAAAGMMQVHQGHMAAAAMAPHGVYALTAGQQGAGGGGQPGSATAGGGQSMFPTHGTTTIMTPMGPMQVATQPGGGPGAGGQGMMVGGGGMQGGLTPMQMQAMGMQGTGAGGMGAVGLHPLLAAGGGYNIQQALQQHMQQQQQGMQQQQQQQQQPGAPLLGSMQNLQALQQQQQQQEALQQQQQLLQQQQQQHHHQFQHHQQQHQQQQQQSQQQVAGSSPGVSWLTHAMGGGGGGGGGGMHMGVMPPGTGCGSAATAMDIGPRVSAGDAPSPFSGLGLSPGITDSGIPDIPEDFIANLNGAGAGPGAGGGMAPMTASMFKTNAANSELLGLFDDELAGISAR

SEQ ID NO: 211 - protein, 276 aa, Zea mays; identical to SEQ ID NO: 122

SEQ ID NO: 212 - protein, 190 aa, Arabidopsis thaliana
MGDSDRDSGGGQNGNNQNGQSSLSPREQDRFLPIANVSRIMKKALPANAKISKDAKETMQECVSEFISFVTGEASDKCQKEKRKTINGDDLLWAMTTLGFEDYVEPLKVYLQRFREIEGERTGLGRPQTGGEVGEHQRDAVGDGGGFYGGGGGMQYHQHHQFLHQQNHMYGATGGGSDSGGGAASGRTRT

SEQ ID NO: 213 - protein, 840 aa, Mangifera indica
MMATASSELSIKSSNETSKSPMEEDKDLNLETALYKELWHACAGPLVTVPRQGERVYYFPQGHIEQVEASTNQFADQQMPIYDLRSKILCRVINVQLKAKPDTDEVFAQITLLPEPNQDENAVEKEPPPPLLPRFHVHSFCKTLTASDTSTHGGFSVLRRHAEECLPELDMSQQPPTQDLVAKDLHGNEWRFRHIFRGQPRRHLLQSGWSVFVSSKRLVAGDAFIFLRCEKELRVGVRRAMRQQGNVPSSVISSHSMHLGVLATAWHAVSTGTMFTVYYKPRISPAEFIVPFDQYMESVKSNYSIGMGFEMRFEGEEAPEQRYTGTIVGIEDADPQRWPDSKWRCLKVRWDETSTVPRPERVSPWKIEPALAPLALNPLPLSRPKRPRSNMVPSSPDSSVLTREGSFKVNVDPSSATGFSRVLQGQEFSTLRGNFAERDSNEFDTAEKSVVRPSSLDDKKIDVVFASRRYGFENCVPAGRSEPMCTDLLSGLGTNSDSVHGYSPSIDQSLASAVPVRKSLLSQEGKFNMLGSPWSLMPSSLSLKMPETNAKVQVQGGDINYLVQGNARYGGLSDYPTLQSHRVGPSNGNWFMPPLVSSHFENLVPSRELMEKPISVQHHEAGKTKDCKLFGIPLVSSSCVTPEPILLHQNSMNEPVGHMNHQLGVLESDPKSEQSKSPTLANDSNCVSEQGKPSQTCQPHVKDVHSKPQSGSSRSCTKVHKQGIALGRSVDLSKFNNYEELIAELDRLFEFGGELMTPKKNWLIIYTDDEGDIMLVGDDPWKEFCGMVRKIFIYTREEVQKMKPGSSLSKGDENLSIGEGTEAKEVKHQSVPSACNDENC

SEQ ID NO: 214 - protein, 215 aa, Ranunculus bulbosus
ALRHEMSVLCDAEVGLIIFSARGKLYEFASAGGMSRTLERYHKNSFSNQDSNLAIDRETQSWYQEVSKLKAKYESLQRSQRHLLGEDLGPLNVKELQNLEKQLEGALAQARSRKTQIMLEQMEALRRKERELGDMNKQLKNKYQLEAEGQGSLRAMQGSWESNALNNYSGHPSHSSSMDCEPTLQIGYHQYVSADGGPIQRNNAGENNFIQGWEL

SEQ ID NO: 215 - protein, 232 aa, Syringa vulgaris
  misc_feature (231)..(231): Xaa can be any naturally occurring amino acid
RMENKINRQVTFAKRRNGLLKKAYELSVLCDAEVALIIFSNRGKLYEFCSSSSMLRTLERYEKCNYGAPEPHVSSREALELSSQQEYLKLKARYEALQRSQRNLLGEDLGPLNSKELESLERQLDMSLKQIRSTRTQAMLDTLTDLQRKEHALNEANQSLKQRLMEGNHISLQWNQDPEEVGYGREPTQHQPHGFFHPLECEPTLQIGYQNDPMAAAGPSLNNFMSGWLPXI

SEQ ID NO: 216 - protein, 277 aa, Brassica oleracea
MNTFPASTEMVGSENESPVTTVVGGDYYPMLAASCPKKPAGRKKFQETRHPIYRGVRLRKSGKWVCEVREPNKKSRIWLGTFKTAEMAARAHDVAALALRGRGACLNYADSAWRLRIPETTCHKDIQKAAAEAALAFEAEKSDVTMEETMAVASQAEVNDTTTDHGMNMEEATAVASQAEVNDTTTDHGVDMEETMVEAVFTEEQSEGFNMAEESTVEAAVVTDELSKGFYMDEEWTYEMPTLLADMAAGMLLPPPSVQWGHNDDLEGDADMNLWSY

SEQ ID NO: 217 - protein, 207 aa, Syringa vulgaris
ALVQLRRMENKINRQVTFAKRRNGLLKKAYELSVLCDAEVALIIFSNRGKLYEFCSTSNMLKTLERYQKCSYGSLEVNNSTRDLEESSNREYLKLKSKYESLQRHQRHLLGDELGPLNINDLEHLEHQLETSLKHIRSTRTQVMVDQLSDLQAKEKMMVETNTALERKLEEIYAANQLQQSWAGGEQSCAYSQQHLNLRTFFNLWMQ

SEQ ID NO: 218 - protein, 206 aa, Medicago truncatula
MADGNLFCIEEDRRMKTYHNQNNHHHHHLALKCPRCNSFNTKFCYYNNYNLSQPRHFCKNCRRYWTKGGILRNVPVGGGSQKSKKSKTASSSSIPSSAATTPTPLQPEADKSDSHSNSDGSTIRVNSVIENEQVNSFRNLIISSSTNDQVHVVQHGDSVMLNHQQFSNEFGSLDWEGGANTVDQSYWTQSHWSDHVIHSSSLFHLP

SEQ ID NO: 219 - protein, 250 aa, Brassica oleracea
MNSVSTFSELLGSENESPVGGDYCPMLAASCPKKPAGRKKFRETRHPIYRGVRLRKSGKWVCEVREPNKKSRIWLGTFKTAEIAARAHDVAALALRGRGACLNFADSAWRLRIPETTCAKDIQKAAAEAALAFEAEKSDTTTNDHGMNMASQAEVNDTTDHGLDMEETMVEAVFTEEQRDGFYMAEETTVEGVVPEEQMSKGFYMDEEWMFGMPTLLADMAAGMLLPPPSVQWGHNDDFEGDADMNLWNY

SEQ ID NO: 220 - protein, 916 aa, Arabidopsis thaliana
MCEPDDNSARNGVTTQPSRSRELLMDVDDLDLDGSWPLDQIPYLSSSNRMISPIFVSSSSEQPCSPLWAFSDGGGNGFHHATSGGDDEKISSVSGVPSFRLAEYPLFLPYSSPSAAENTTEKHNSFQFPSPLMSLVPPENTDNYCVIKERMTQALRYFKESTEQHVLAQVWAPVRKNGRDLLTTLGQPFVLNPNGNGLNQYRMISLTYMFSVDSESDVELGLPGRVFRQKLPEWTPNVQYYSSKEFSRLDHALHYNVRGTLALPVFNPSGQSCIGVVELIMTSEKIHYAPEVDKVCKALEICNESRQNALAEILEVLTVVCETHNLPLAQTWVPCQHGSVLANGGGLKKNCTSFDGSCMGQICMSTTDMACYVVDAHVWGFRDACLEHHLQKGQGVAGRAFLNGGSCFCRDITKFCKTQYPLVHYALMFKLTTCFAISLQSSYTGDDSYILEFFLPSSITDDQEQDLLLGSILVTMKEHFQSLRVASGVDFGEDDDKLSFEIIQALPDKKPVVQSSDPVNEKINVATVNGVVKEKKKTEKKRGKTEKTISLDVLQQYFTGSLKDAAKSLGVCPTTMKRICRQHGISRWPSRKIKKVNRSITKLKRVIESVQGTDGGLDLTSMAVSSIPWTHGQTSAQPLNSPNGSKPPELPNTNNSPNHWSSDHSPNEPNGSPELPPSNGHKRSRTVDESAGTPTSHGSCDGNQLDEPKVPNQDPLFTVGGSPGLLFPPYSRDHDVSAASFAMPNRLLGSIDHFRGMLIEDAGSSKDLRNLCPTAAFDDKFQDTNWMNNDNNSNNNLYAPPKEEAIANVACEPSGSEMRTVTIKASYKDDIIRFRISSGSGIMELKDEVAKRLKVDAGTFDIKYLDDDNEWVLIACDADLQECLEIPRSSRTKIVRLLVHDVTTNLGSSCESTGEL

SEQ ID NO: 221 - protein, 323 aa, Arabidopsis thaliana
MVRPPCCDKGGVKKGPWTPEEDIILVTYIQEHGPGNWRAVPTNTGLLRCSKSCRLRWTNYLRPRIKRGNFTEHEEKMIVHLQALLGNRWAAIASYLPQRTDNDIKNYWNTHLKKKLNKVNQDSHQELDRSSLSSSPSSSSANSNSNISRGQWERRLQTDIHLAKKALSEALSPAVAPIITSTVTTTSSSAESRRSTASASGFLRTQETSTTYASSTENIAKLLKGWVKNSPKTQNSADQIASTEVKEVIKSDDGKECAGAFQSFSEFDHSYQQAGVSPDHETKPDITGCCSNQSQWSLFEKWLFEDSGGQIGDILLDENTNFF

SEQ ID NO: 222 - protein, 354 aa, Cicer arietinum
MSPDIAKIRKLVRQSKCLQDKMTAKESATWLAIINQEEALARELYPDYCPSLSSGGGSGSMVINDCSEYDVDGADDETNFDVVEDRKPENLHPSNLGMERMRGMVPVQQPSLPMKGEVVTNLDFIRKRKISNDFNMIIDQKLYTCEHPQCPYSEVRLAFQDRSSRDNHQLNCPYRNSPADYGGSNFHATEVKPIIFPQSFVQPNSTAQPAGLVPPSFDLTGLGVPEDGQKMITELMSIYDTNVIGNKNASSTNCVAVENQNLSQPCIQQQQDNFFSSQGMVMEAANFFTRDESQFDRFKPINSPFETNHNNNNIHLMFGSPCDLASFDFKEDIQLQGVGIDTFHKQPDMSIWYN

SEQ ID NO: 223 - protein, 312 aa, Brassica napus
RPTRPDDASFDCEDDDEDDDVFAKVKPFVFTATTKPAAPPPAPSGSVSGKKIIESGGQAEKSAKRKRKNQYRGIRQRPWGKWAAEIRDPRKGSREWLGTFDTAEEAARAYDAAARRIRGSKAKVNFPEESNNNRSVSQKRPSAKKLVAKPNQSPALVQQPMSQYCNNSFGDVSFVEEKPQMYNNQFGLANSYNNHYFSSDQGSNSFDCSEFGWSDHGPKTPEISSMLVGNNQAPFTEETNAAKKLKPSSDDGTSNQSDDLMAYLDNALWESPSPLEVEAMLGVDAVAVTQGEENPMDLWSLDDINYMLEGVF

SEQ ID NO: 224 - protein, 250 aa, Salix discolor
MGRGRVQLKRIENKINRQVTFSKRRTGLLKKAHEISVLCDAEVALIVFSHKGKLFEYSTDDCMEKILERYERYSYEERQLAATDFDSPGNWTLEYNRLKAKVELLQRNHRNYLGEDLDSMSLKELQNLEQQIDTALKHIRARKNHLMSQSISELQRKEKAIQVQNNMLVKQIKEKEKKDKAVAQPALWDDQQNQGPHASSFLLSQPAGLPLPCLNIGGCYQEETDPEVRRNELDHALEPTYSFHLGGYGA

SEQ ID NO: 225 - protein, 328 aa, Hordeum vulgare
MCGGAILAQLIPPSAGRPSKQAAAGGRAPPTSSKKGGVSKSRHSSTPDADDDVFEAAFEDFDDHFDLRAEEDGGDDHVVFASKPAFSPRPAYDGGRAAHAASRKKRTGHLHGIRQRPWGKWAAEIRDPHKGTRVWLGTFDTADDAARAYDVAARRLRGSKAKVNFPDAARTGARPRRASRRTAQKPQCPPARTTAYSATAAARAQPEQDAMMVKPELMEFFNVDAIVHLTTAVAALPPVTASTFADTMPRVDEDSSVGSGGGAMLGFADELGFDPFMMFQLPCSDMYESADSIFAGDAVIPDALSVDSGMDAVSLWSFDEFPMDSAIF

SEQ ID NO: 226 - protein, 356 aa, Oryza sativa
GRESAAACSPKPKLRRGLWSPEEDEKLFNHISRYGVGCWSSVPKLAGLERCGKSCRLRWINYLRPDLKRGSFSQQEEELIISLHKILGNRWSQIAAQLPGRTDNAIKNYWNSCLKKKLRQRGIDPATHKPLNDGGAGAGEEHHDDGDKQQLMDDVDDCFAIGGGGSSDSLAPPHSPAVSFDPLSVTNVPTTMMQSSSSPYGAAGGEHSSFRSDTLCDYGGSGGGVDVVSDAGTYSAYTGDSSSNSNSTAWTCGSVVVGGAGELPPPPLLPHMDMFGRVDAEPPPYPPFDVQARFSPWHHHHHHHHEPTLPTPPQRLDGGGGAAASFPIRSLSRDMPESCFDLGRGALDDEFGVDFL

SEQ ID NO: 227 - protein, 445 aa, Oryza sativa
MSFRSIVRDVRDGFGSLSRRGFEVRLVGHRRGRSHSAVHELRDGHAAAAAADVVQSSCWANLPPELLRDVIERLEASEAAWPSRKNVVACAAVCRTWRDMCREIVKNPEFCGKITFPVSLKQPGPRNGAIQCFIKRDKSTQTYNLYLCLSSAVLVESGKFLLSAKRYSRATCTEYTIFMSADNTSRSSNMYIGKLRSNLLGTKFVIYDTQPPCNTANVSQSGKTSRRFYSRKVSPKNPSSTYSIAQVSYELNVLGTRGPRRMNCVMHSIPASSLEAGGTVPCQPDSVLARSLDESFGSISFSKSSIMDRSIRFSSSRYSDISVGGPMVGGQALGDSDESKERPLILRNKAPRWHEQLQCWCLNFKGRVTVASVKNFQLVAATQPAAGAPTPSQPAPPPPPDHDKVILQFGKVAKDMFTMDYRYPLSAFQAFAICLSSFDTKLACE

SEQ ID NO: 228 - protein, 291 aa, Triticum aestivum
MGRPPCCDKVGVKKGPWTPEEDLMLVSYIQEHGPGNWRAVPTNTGLMRCSKSCRLRWTNYLRPGIKRGNFNDQEEKLIVHLQALLGNRWAAIASYLPERTDNDIKNYWNTHLKKKLKKMQDAGGNDGGSEGAGAGGVGGGVTKAAAPKGQWERRLQTDIHTAREALRDALSLEPSQAARLAVPELPTPTPGSVTTYASSANNIARLLEGWMRPGDSTKGPEVSGPRRPLGEQPARSHSVLGRGGGPFREIQTGGPGGGGPPENPGGLHGKENSCRPPGPGGPPEGSQGRET

SEQ ID NO: 229 - protein, 219 aa, Brassica napus
  misc_feature (198)..(198): Xaa can be any naturally occurring amino acid
RPTRPVENGKFLLSAKRTRRTTRTEYIISMDAENISRSSNSYLGKLRSNFLGTKFLVYDTQPPPDTSSSSSSALITDRTSRSRFHSRRVSPKVPSGSYNIAQITYELNVLGTRGPRRMHCIMNSIPTSSLEPGGSVPNQPEKLLPPPPRSFDDSFRSNISFSKSSFDHRSVDFSSSRFSEMGVSCEEDQGETSFKPLXLKSRQPRWHEQLQCWCLNFRG

SEQ ID NO: 230 - protein, 221 aa, Brassica napus
SNNKSCLLNVPNSDTNPFDNAFDFGSDSCFLSQGFGLLTQLRNRDLSSVPDFLSSPENNNSTTLYGGGGGFTPSDSQGFTSLAKVLKPLEVLASSGAQPTLFQITSRCLQRRKKLNDRLYMLRSVVPKISKMDRASILGDAIDYLKELLQRINDLHNQLESTPTGSLPPTSSSFHPLTPTPQTLSCRVKEELCPSSLPSPKSQQARVEVRLREGRAVNIHM

SEQ ID NO: 231 - protein, 203 aa, Glycine max
NMVSATVDSDFAFLESVQQYLLGHDSINLMSETHQAASHDPFSDPNKCDGDSGNIAFRSEDATAVVARDHAPPTWKHYRGVRRRPWGKFAAEIRDPKKNGARVWLGTYDTEEKAALAYDKAAFKMRGQKAKLNFPHLIDSDNSDELSEPVMMTTSKRSLLEISSPSSSCSDDSSESQGTKRRKSLAELLNKLAKNRSQVKVEC

SEQ ID NO: 232 - protein, 250 aa, Salix discolor
MGRGRVQLKRIENKINRQVTFSKRRTGLLKKAHEISVLCDAEVALIVFSHKGKLFEYSTDDCMEKILERYERYSYEERQLATTDFDSQGNWTLEYNRLKAKVELLQRNHRNYLGEDLDSMSLKELQNLEQQIDTALKHIRARKNHLMSQSISELQRKEKAIQVQNNMLVKQIKEKEKKDKAVAQPAPIWDDQQNQGPHASSFLLSQPAGLPLPCLNIGGCYQEEAPEVRRNELDHALEPTYSFHLGGYGA

SEQ ID NO: 233 - protein, 235 aa, Oryza sativa
MQLLRGLEPTKTEVKDVVILERDSISNGAGKDAKDINDQEMERLNGIHISSKPDHSHENCLDTSSQQFKPKSNSVETTYVDWSAAKASHYQMDRNGVTGFQATGTEGSHPDQTSDQMGGASGTMNQCIHPTLPVDPKFDGNAAAQPFPHNYAAFAPMMQCHCNQDAYRSFANMSSTFSSMLVSTLLSNPAIHAAARLAASYWPTVDGNTPDPNQENLSESAQGSHAGSPPNMASI

SEQ ID NO: 234 - protein, 552 aa, Arabidopsis thaliana
MTMEQEIEVLDQFPVGMRVLAVDDDQTCLRILQTLLQRCQYHVTTTNQAQTALELLRENKNKFDLVISDVDMPDMDGFKLLELVGLEMDLPVIMLSAHSDPKYVMKGVKHGACDYLLKPVRIEELKNIWQHVVRKSKLKKNKSNVSNGSGNCDKANRKRKEQYEEEEEEERGNDNDDPTAQKKPRVLWTHELHNKFLAAVDHLGVERAVPKKILDLMNVDKLTRENVASHLQKFRVALKKVSDDAIQQANRAAIDSHFMQMNSQKGLGGFYHHHRGIPVGSGQFHGGTTMMRHYSSNRNLGRLNSLGAGMFQPVSSSFPRNHNDGGNILQGLPLEELQINNNINRAFPSFTSQQNSPMVAPSNLLLLEGNPQSSSLPSNPGFSPHFEISKRLEHWSNAALSTNIPQSDVHSKPDTLEWNAFCDSASPLVNPNLDTNPASLCRNTGFGSTNAAQTDFFYPLQMNQQPANNSGPVTEAQLFRSSNPNEGLLMGQQKLQSGLMASDAGSLDDIVNSLMTQEQSQSDFSEGDWDLDGLAHSEHAYEKLHFPFSLSA

SEQ ID NO: 235 - protein, 204 aa, Chloranthus spicatus
LCDAEVALIVFSNRGKLYEFCSSSSMLKTLERYQKCNYGAPDTTVSTREMQSSQQEYLKLKARVEALQRSQRNFLGEDLGPLSGKELEQLERQLDMSLKQIRSTRTQYMLDQLTDLQRREQMLCETNKALKRRLDEVTPANPHQGWDPNPHGVSYGRQAAQQQGDGFFHPLECEPTLQIGYQHDQITIAAPGPSVSNYMPGWLA

SEQ ID NO: 236 - protein, 150 aa, Zea mays subsp. parviglumis
MDWDLKAAGAWDLAELEQDHAAAAPSSGGHAANAAAAGTGTESRPPAPGAAGAPAECSVDLKLGGMGECEPGAARREREAAAGAAKRPRPAGPGGQQQQQCPSCAVDGCRADLGKCRDYHRRHKVCEAHSKTPVVVVAGREMRFCQQCSR

SEQ ID NO: 237 - protein, 179 aa, Daucus carota
MERADQQARGFQGYRKIHQQQQLPASGTASTGTDNNPAAGDQDCLVREQDRFMPIANVIRLMRKSIPSHAKISDDAKELVQESVSEFISFVTSEANYRCQKEQRKTITAEDVLWAMSSLGFDDYVEPLTFYLDRFREADGGERTALRGEPLVKKSGEHGHRGFLQHLHHGTIWGRIMRF

SEQ ID NO: 238 - protein, 248 aa, Anthurium andraeanum
MTAKAKRGAAVAAEARVAKKRVVKLNKGPWTAEEDQKLVEYVDAHGDRKWTSLPTKAGLNRCGKSCRLRWLNYLRPGIKRGNISEAEEDMIIRLHNLIGNRWSLIAGRLPGRTDNEIKNYWNTHLSKKPLTISDLNDKLNDDGGSRSDVDEPPSSGQSQGPLDSRRPAEPRISEASNEVAFNVDELVNLPAILDFDDLLDSGSCSDGIITSSQIFWTPNFSAHDQQDISDFDDLGMLMDIMDYVICPP

SEQ ID NO: 239 - protein, 150 aa, Zea mays subsp. parviglumis
MDWDLKAAGAWDLAELEQDHAAAAPSSGGHAANAAAAGTGTESRPPAPGAAGAPAECSVDLKLGGMGECEPGAVRREREAAAGAAKRPRPAGPGGQQQQQCPSCAVDGCRADLGKCRDYHRRHKVCEAHSKTPVVVVAGREMRFCQQCSR

SEQ ID NO: 240 - protein, 83 aa, Daucus carota
WPMAKLGFEDYIEPLKVYLARYREMEGDTKGSGKGAEGSSRKEGVQPVHQGQLVHQGSYPQGVIYGNSQQQTQHMMVPMQGPQ

SEQ ID NO: 241 - protein, 150 aa, Zea mays subsp. parviglumis
MDWDLKAAGAWDLAELEQDHAAAAPSSGGHAANAAAAGTGTESRPPAPGAAGAPAVCSVDLKLGGMGECEAGAARREREAAAGAAKRPRPAGPGGQQQQQCPSCAVDGCRADLGKCRDYHRRHKVCEAHSKTPVVVVAGREMRFCQQCSR

SEQ ID NO: 242 - protein, 62 aa, Daucus carota
WAMGTLGFEDYIEPLKVYLARYREMEGDTKRSGKGAEGSSRKEVYNRFIRDSLFIKVHIHRV

SEQ ID NO: 243 - protein, 385 aa, Trifolium pratense
MCGGAIISDFIPAAAAVGGSRRVTADILWPNLRKTGSKKSSFLLDDDFEAGFRQFKDDSDFDEDEDEDDDEGLLVGVKGFTFAASNNKSSRNFSRGSAGAKSVASKSNEQAEKESKRKRKNQYRGIRQRPWGKWAAEIRDPRKGVRVWLGTFNTAEEAARAYDAEARRIRGKKAKVNFPDEAPNASSKRLKTNPDNQLLNKNLNSFKPNGNNKMFNFSENMENFYSPMDQVEQKPLVNNQYGAADIGAFTGNGVHLAPADVNAYFSSEHSSNSFDYSDLCWGEQGPKTPEISSVFSAPLEAEPQMNMQSNNSQDMLPMQAESAKTLSEELADIESQLKFFENSFDDNWSDASLASLLGADVTQDAGNTMNLWSFDDLPSIAGGVF

SEQ ID NO: 244 - protein, 243 aa, Oryza sativa (japonica cultivar-group)
MGQSKKKFRGVRQRHWGSWVSEIRHPLLKRRVWLGTFETAEEAARAYDEAAILMSGRNAKTNFPVARNATGELTPAAAVAGRDGRVGGGSGSSSSMTANGGGNSLSQILSAKLRKCCKTPSPSLTCLRLDPEKSHIGVWQKRAGARADSSWVMTVELNKDTAVSSAATVAAATAVSSSDQPTPSDSTVTTTSTSTTGSPSPPPPAMDDEERIALQMIEELLGRSGPGSPSHGLLHGGEGSLVI

SEQ ID NO: 245 - protein, 128 aa, Geobacter sulfurreducens PCA
MGRINVLIVDDDVNFLYVLGLLLESKDLEVTSASRGAEAVDIVRKTTFDMVITDFSMPGMNGLELAAAVKELHPDLPVMMVTCEVTSDLIEMATDVGICRVLDKPVNVGRLLADIRHFSRRKGRHTPA

SEQ ID NO: 246 - protein, 113 aa, Zea luxurians
  misc_feature (109)..(109): Xaa can be any naturally occurring amino acid
MGRRACCAKEGVKRGAWTTKEDDALAAYVKAHGEGKWREVPQKAGLRRCGKSCRLRWLNYLRPNIRRGNISYDEEDLIIRLHKLLGNRWSLIAGRLPGRTDNEIKNYWXSTLV

SEQ ID NO: 247 - protein, 304 aa, Arabidopsis thaliana
MEKPGGFWIPKKSNKESSWEELAFAEDDAAGSLWPPRSYTCSFCRREFKSAQALGGHMNVHRRDRARLKQADDQYLFPKSSSSPEYPSHKDSDNIHETSCYTLVFNTKPNYFKTQHSCGIDLSSSSSLPYLTPSRGSSGLPGKQHTSSSPPSFVVEPSKNSKYIPSSSPWSCPSTVVEQKSCDLYEIPAMEGEKKRKTESDVPKIGHKAKLSLGNTTDLSVSMNLVIHQSFPITAHGSDEEIGRVDIRKRRRRHESPSQQSIFISSLSCKSDIITRNEESKHKGDRFEDLDLELRLGTDPPKGI

SEQ ID NO: 248 - protein, 113 aa, Zea luxurians
MGRRACCAKEGVKRGAWTSKEDDALAAYVKAHGEGKWREVPQKAGLRRCGKSCRLRWLNYLRPNIRRGNISYDEEDLIIRLHRILGNRWSLIAGRLPGRTDNEIKNYWNSTLV

SEQ ID NO: 249 - protein, 131 aa, Brassica napus
MVQTKKFRGVRQRHWGSWVAEIRHPLLKRRIWLGTFETAEEAARAYDEAAVLMSGRNAKTNFPLKNNSTIDTSESKTDISSSSSSSSSSSSSSLSSILSAKLRKCCKSPSPSLTCLRLDTTSSHIGVWQKR

SEQ ID NO: 250 - protein, 257 aa, Antirrhinum majus
FPFSSSSLNGLNFGKKIYFENVGSSGLQSSPSKKGRSGGVVQGGQPPRCQVEGCKIDLSDAKAYYSRHKVCGMHSKSPKVIVAGIEQRFCQQCSRFHQLPEFDQGKRSCRRRLAGHNERRRKPPPVSTISPRYGSLSPTIFDNYSKPGGFVLDFSSSHPNLTGKDSWANTSSERGLGNQLSWQSNSQNPLPDFLQGSSTSSRPSYSGHGVSSVECFGGVSSDSSGALSLLSNQPWGSRTRASSLGLNNFLGTTTNGE

SEQ ID NO: 251 - protein, 805 aa, Zea mays
MPPATAMAPPSQPPSNSGDPLYPELWRACAGPLVTVPRVGDLVFYFPQGHIEQVEASMNQVAGNQMRLYDLPPKLLCRVLNVELKAETDTDEVYAQIMLMPEPEQTDVPAEKPSSAPAASPRPAVRSFCKTLTASDTSTHGGFSVLRRHADECLPPLDMTQSPPTQELVAKDLHGMEWRFRHIFRGQPRRHLLQSGWSVFVSSKRLVAGDAFIFLRGENGELRVGVRRAMRQLSNVPSSVISSQSMHLGVLATAWHAINTKSMFTVYYKPRTSPSEFIIPYDQYMESVKNNYSIGMRFRMRFEGEEAPEQRFTGTIVGCENLDPLWPDSSWRYLKVRWDEPSTIPRPDRVSPWKIEPASSPPVNPLVHSSRAKRPRQNVPPPSLESSVLTKEGATKVEIDSAQTQHQNSVLQGQEQMTLRNNLTESADSDSTVQKPMMWSPSLNGKAHTHFQQRPAMDNWMPLGRRENDFKDTRSAFKDARTASQSFGDTQGFFVQAYDDNHHRLSFKNQGSTHRFADPYFYMPQQSSVTVESSTRTQTANNDLCFWGDQNAMYGNPSDQQQGFNFGQNPSSWLNQPFPQVEQPRVVRPHATVAPFDLEKTREGSGFKIFGFQVDTTSPSPVQLSSPLPAIQEHVLQTRPSAPVNELQPVQIECLPEGSVSTAGTATENIQQAPQSSKDIQSKSQGASTRSCTKVHKQGVALGRSVDLSKFTDYGELQAELDKMFDFEGELVSGSQNWQIVYTDDEGDMMLVGDDPWEEFCSIVRKIYIYTKEEVQKMNSKSAAPRKEESPAAGGGGGCAAATNE

SEQ ID NO: 252 - protein, 323 aa, Antirrhinum majus
SAAGGAEESLNGLKFGKKIYFEEAKAKKGKSTGGVVRCQVEGCEVDLSDAKAYYLRHKVCSMHSKSPKVIVAGIEQRFCQQCSRFHQLPEFDQGKRSCRRRLAGHNERRRKPSPGSMMSPYYGSLSPTLFDNQNRTGGFLMDFSTYPNLAGKDSWPNTIPERGLGGPASPWQSDMQNPVPEFLRGTTNRPSFSGLGVSSEECFSGVSNSSTALSLLSNQSWGSRNSNNFLGTNGNGPTIVQPSINPGATIGQFTCPSWGFGGNPADNTSHDMPPNLNLGQFSHSSNSHYTGEPGVVQLSHGQFQDLDHSRGYDSSVQDMHWSL

SEQ ID NO: 253 - protein, 347 aa, Petunia x hybrida
MEGGGNSSGNNTSSLMAYGDHENNNNAICPPMMMMMMPPPPLSITNTSNNGESSSNNNNNILFLPFMENNSNTIHEDGNSCSSNIKAKIMAHPHYPRLLAAYINCQKIGAPPEVVARLEEVCATSAHMGRNGGGGGGGGNNVIGEDPALDQFMEAYCEMLTKYEQELSKPFKEAMVFLSRIECQFKALTLASTSESVAAFGEAMDRNGSSEEEVDVNNSLVDPQAEDRELKGQLLRKYSGYLGSLKQEFMKKRKKGKLPKEARQQLLDWWTRHYKWPYPSESQKLALAESTGLDQKQINNWFINQRKRHWKPSEDMQFVVMDAAHPHYYIDNVLGNPFPMDMTPTLL

SEQ ID NO: 254 - protein, 137 aa, Mirabilis jalapa
DSLSIPFVGSTFRSAIGNELPPGSEMSTTSCIDESGYLQSIENVDQTNQPTRTFVKVHKMGSFGRSLDISQFSSYQELRSELARLFGLENELKDSPRSGSQLVFVDRENDVLLLGDDPWQEFVKTVGHIRILSPQEV

SEQ ID NO: 255 - protein, 683 aa, Hordeum vulgare subsp. vulgare
MDASAGSSPPRHPQGSAPRRGKGPAVEIRHGEDDFMFAQDTFPALPDFPCLSSPSSSNFSSSSSSNSSSAFAAPAGVGGRGGEGTRGEPSEPAAAGDGVDDLSDIDHLLDFASINDDVPWDDEPLFPDVGMMLEDVISEQQQQQQQHPLAGYGAGGRVASDAAGGGGEDAFMGGGGSGSAADDLPRFFMEWLTNNRDCISAEDLRSIRLRRSTIEAAAARLGGGRQGTMQLLKLILTWVQNHHLQKKRPRVGAMDQEAPPAGGQLPSPGANPSYEFPTETGAAAATSWMPYQAFSPTASYGGEAMYPFQQGCSTSSVVVSSQPFSPPAAADMHAGAWPLQYAAFVPAGATFAGTQTYPMPPPGPVPQPFAAPGFAGQFPQRMEPAATREARKKRMARQRRLSCLQQQRSQQLNLSQIQTGGFPQEPSPRAAHSAPVWGGHWSPPAVQAQPHGQLMIQVPNPLSTKSNSSRQKQQKPSPDAAARPPSGGAASQQRQGQAAASDKQRQQGGIKDGGGAAGRRQEPAVPAAEGAEAERRRNPRPHRAPQRKEAETHLPELKTGDGISIPIEDIGTSQVWSMRYRFWPNNKSRMYLLENTGDFVRSNELQEGDFIVLYSDVKSGKYLIRGVKVRAAQELAKHKNGSPEKGGASEVKAEDGGCKEKSPHGVRRSRQEAASMNQMAVSI

SEQ ID NO: 256 - protein, 147 aa, Vitis vinifera
LKFAHFTANQAILEAFEGKKRVHVIDFSMKQGMQWPALMQALALRPGGPPSFRLTGIGPPSTDNTDHLHEVGWKLAQLAETIHVEFEYRGFVASSLADLDASMLELRDGESVAVNSVFELHSLLARPGGIERVLSAVKDMKPDIVTI

SEQ ID NO: 257 - protein, 150 aa, Zea mays subsp. parviglumis
MDWDLKAAGAWDLAELEQDHAAAAPSSGGHASNAAAAGTGTESRPPAPGAAGAPAECSVDLKLGGMGECEPGAARREREAAAGAAKRPRPAGPGGQQQQQCPSCAVDGCRADLGKCRDYHRRHKVCEAHSKTPVVVVAGREMRFCQQCSR

SEQ ID NO: 258 - protein, 184 aa, Sorghum bicolor
MGRQPCCDKVGLKKGPWTAEEDQKLVTFLLANGHCCWRAVPKLAGLLRCGKSCRLRWTNYLRPDVKRGLLSSEEERTVIDLHEQLGNRWSKIASQLPGRTDNEIKNHWNTHIKKKLRKMGIYPVTHKPLHQPASPPPLTRQEQDTGGGSPEKEEKEKEKLLWQATPSVWARDVLRRRGAHGAPS

SEQ ID NO: 259 - protein, 150 aa, Zea mays subsp. parviglumis
MDWDLKAAGAWDLAELEQDHAAAAPSSGGHAANAAAAGTGTESRPPAPGAAGAPAECSVDLKLGGMGECDPGAARREREAAAGAAKRPRPAGPGGQQQQQCPSCAVDGCRADLGKCRDYHRRHKVCEAHSKTPVVVVAGREMRFCQQCSR

SEQ ID NO: 260 - protein, 162 aa, Sorghum bicolor
MGRQPCCAKVGLKRGPWTVEEDQKLVTFLLTNGHCCWRAVPKLAGLLRCGKSCRLRWTNYLRPDVKRGLLSSEEERTVIDLHEQLGNRWSKIASQLPGRTDNEIKNHWNTHIKKKLRKMGIDPVTHKPLHQPASPPPPPPLTRQEQEEKDTRGSPKKKRRRR

SEQ ID NO: 261 - protein, 150 aa, Zea mays subsp. parviglumis
MDWDLKAAGAWDLAELEQDHAAAAPSSGGHAANAAAAGTGTESRPPAPGAAGAPAECSVDLKLGGMGECEAGAARREREAAAGAAKRPRPAGPGGQQQQQCPSCAVDGCRADLGKCRDYHRRHKVCEAHSKTPVVVVAGREMRFCQQCSR

SEQ ID NO: 262 - protein, 150 aa, Zea mays subsp. parviglumis
MDWDLKAAGAWDLAELEQDHAAAAPSSGGHAANAAAAGTGTESRPPAPGAAGAPAECSVDLNLGGMGECEPGAARREREAAAGAAKRPRPAGPGGQQQQQCPSCAVDGCRADLGKCRDYHRRHKVCEAHSKTPVVVVAGREMRFCQQCSR

SEQ ID NO: 263 - protein, 204 aa, Sorghum bicolor
MGRQPCCDKVGLKKGPWTAEEDQKLVTFLLANGHCCWRAVPKLAGLLRCGKSCRLRWTNYLRPDVKRGLLSSEEERTVIDLHEQLGNRWSKIASQLPGRTDNEIKNHWNTHIKKKLRKMGIYPVTHKPLHQARFPPPLTRQEQDTGGGSPEKEEKEKEKAVVAIPQTWAQDVCADKVLWTPLYTSSCTAGDHYSGLPTTPRLFS

SEQ ID NO: 264 - protein, 113 aa, Zea luxurians
  misc_feature (42)..(42): Xaa can be any naturally occurring amino acid
MGRRACCAKEGVKRGAWTTKEDDALAAYVKAHGEGKWREVPXKAGLRRCGKSCRLRWLNYLRPNIRRGNISYDEEDLIIRLHKLLGNRWSLIAGRLPGRTDNEIKNYWNSTLV

SEQ ID NO: 265 - protein, 113 aa, Zea luxurians
MGRRACCAKEGVKRGAWTSKEDDALAAYVKAHGEGKWREVPQKAGLRRCGKSCRLRWLNYLRPNIRRGNISYDEEDLIIRLHRLLGNRWSLIAGRLPGRTDNEIKNYWNSTLV

SEQ ID NO: 266 - protein, 88 aa, Triticum aestivum
MSSGSSSRSNSPSSDSEWSKKENKMFEEALAYYGVGAPNLCEKVASAMGGTKSTEEVRRHFQFLVDDVNNIEHGRIPFPKYKTQGFWT

SEQ ID NO: 267 - protein, 660 aa, Physcomitrella patens
MAMALKTNLVHPGVMSGIQVPECWSSTGLEYENLAESWEWEDPITSFPSRLVEGHLRPQSNSWVAAACSAVSLAAVGASKPGEFQHGYILGSGTHLGTSFSSGISDVAGGRRNCGADFPALVKNEPDEHKAEQVTVGKPVSLSGRKDGYFFSLRSSPSPKNEDRPAEEDNHTQPCGGQSSGSGLVNGGRDCQKVALKPGRRTHFENSAVVGQVKASLTAFSPPGKKQRALSPSTQIPRCQVQGCDADLSCCKDYHKRHKVCEMHSKAATAIAAGIEQRFCQQCSRFHVLKEFDEGKRSCRRRLAGHNQRRRKSQPETRSLFDFSGSFLRRGISTSSIAGSPFYIPDSKQSSFLHPHLPSSLEHGLHAYGYNLTRSSPWPLKSRDGSIPALQLQGSSSPVAAPYPSSGLILGGYHFLDGPLGSPGQGLSLSSSTGGVLGSLEQSRVGSCSQSLSSVSGLANSGRALSLLSLQSWASRPTQGASAPVSLGLSQADDSTLEQLVASSSDCSNRGSRFSHHLQLPCGGSSTSAQQQFDKQLSIQSGGLESVGLNCGLAATGYGAHHHQGSGNPNILAGFRGYYETNSTLSAHNGQDIQTLNSICASHHAFPTINLMQLDQPSDQVHQGTPYSHGLYLPVSVGEHRGFTDLRPFESSMCSSQHLL

SEQ ID NO: 268 - protein, 275 aa, Oryza sativa
RKGLWSPEEDEKLMNHITKHGHGCWSTVPRLAGLQRCGKSCRLRWINYLRPDLKRGAFSQEEEDLIVELHAVLGNSRWSQIATRLPGRTDNEIKNLWNSCIKKKLRQKGIDPNTHKPLAEVDRSKATPTISNDRTSESSDVDPSSGVALHNLSHLLPRAAQSSELLPVKVTKPRTQAPGLARLKVPPKELFLDQLTSGHENLPSCRSSGPIPNFPFQQLLCYNNDFNSMDVGNRNSLWYNQNESSSSTNSTVNAPVSPSSLSTLKGVNPYQEMEL

SEQ ID NO: 269 - protein, 91 aa, Eragrostis tef
QVLKQSDVGSLGRIVLPKKEAEIHLPELKTRDGISIPMEDIGSSRVWNMRYRFWPNNKSRMYLLENTGDFVRYNELQEGDFIVIYSDVKSG

SEQ ID NO: 270 - protein, 150 aa, Zea mays subsp. mexicana
MDWDLKAAGAWDLAELEQDHAAAAPSSGGHAANAAAAGTGTESRPPAPGAAGAPAECSVDLKLGGMGECEPGAARRERETAAGAAKRPRPAGPGGQQQQQQCPSCAVDGCRADLGKCRDYHRRHKVCEAHSKTPVVVVAGREMRFCQQCS

SEQ ID NO: 271 - protein, 181 aa, Arabidopsis thaliana
MARPQQRFRGVRQRHWGSWVSEIRHPLLKTRIWLGTFETAEDAARAYDEAARLMCGPRARTNFPYNPNAIPTSSSKLLSATLTAKLHKCYMASLQMTKQTQTQTQTQTARSQSADSDGVTANESHLNRGVTETTEIKWEDGNANMQQNFRPLEEDHIEQMIEELLHYGSIELCSVLPTQTL

SEQ ID NO: 272 - protein, 150 aa, Zea mays subsp. mexicana
MDWDLKAAGAWDLAELEQDHAAAAPSSGGHAANAAAAGTGTESRPPAPGAAGAPAECSVDLKLGGMGECEPGAARREREAAAGAAKRPRPAGPGGQQQQQQCPSCAVDGCRADLGKCRDYHRRHKVCEAHSKTPVVVVAGREMRFCQQCS

SEQ ID NO: 273 - protein, 205 aa, Oryza sativa (japonica cultivar-group)
MVQPKKKFRGVRQRHWGSWVSEIRHPLLKRRVWLGTFETAEEAARAYDEAAVLMSGRNAKTNFPVQRNSTGDLATAADQDARSNGGSRNSSAGNLSQILSAKLRKCCKAPSPSLTCLRLDPEKSHIGVWQKRAGARADSNWVMTVELNKEVEPTEPAAQPTSTATASQVTMDDEEKIALQMIEELLSRSSPASPSHGEGEGSFVI

SEQ ID NO: 274 - protein, 256 aa, Zea mays
MGRGRVELKRIENKINRQVTFSKRRNGLLKKAYELSVLCDAGVALIIFSGRGKLYEFGSAGVTKTLERYQHFCYNAQDSNNGALSESQSWYQEISKLRAKFEALQRTQRHLLGEDLGPLSTVKELQQLEKQLECALSQARQRKTQLMMEQVEELRRTERHLGEMNRQLKHKLEAEGCSNYTTLQHAACWPAPGGTIVEHDGATYQVHPPAHSVAMDCEPTLQIGYPHHQFPPPEAANNIPRSAATGENNFMLGWVL

SEQ ID NO: 275 - protein, 150 aa, Zea mays subsp. parviglumis
MDWDLKAAGAWDLAELEQDHAAAAPSSGGHAANAAAAGTGTDSRPPAPGAAGAPAECSVDLKLGGMGECEPGAARREREAAAGAAKRPRPAGPGGQQQQQCPSCAVDGCRADLGKCRDYHRRHKVCEAHSKTPVVVVAGREMRFCQQCSR

SEQ ID NO: 276 - protein, 150 aa, Zea diploperennis
MDWDLKAAGAWDLAELEQDHAAAAPSSGGHAANAAAAGTGTESRPPAPGAAGAPAECSVDLKLGGMGECEPGAARREREVVAGAAKRPRPAGPGGQQQQQCPSCAVDGCRADLGKCRDYHRRHKVCEAHSKTPVVVVAGREMRFCQQCSR

SEQ ID NO: 277 - protein, 258 aa, Triticum aestivum
MGRGRVELKRIENKINRQVTFSKRRNGLLKKAYELSVLCDAEVALIIFSSRGKLYEFGSAGTTKTLERYQHCCYNAQDSNGALSETQSWYQEMSKLKAKFEALQRTQRHLLGEDLGPLSVKELQQLEKQLECSLSLARQRKTQLMMEQVEELRRKERQLGDINRQLKHKLDAEGSNSNNYRAMQQISWAAGTVVDEGAAAYHMQQQQQHPNHSAAMDCEPTLQIGYHHQFAAPDQAANNIPRSSAPGGENNFMLGWVL

SEQ ID NO: 278 - protein, 556 aa, Arabidopsis thaliana
  misc_feature (29)..(29): Xaa can be any naturally occurring amino acid
  misc_feature (40)..(40): Xaa can be any naturally occurring amino acid
  misc_feature (48)..(48): Xaa can be any naturally occurring amino acid
  misc_feature (67)..(67): Xaa can be any naturally occurring amino acid
  misc_feature (75)..(75): Xaa can be any naturally occurring amino acid
  misc_feature (86)..(86): Xaa can be any naturally occurring amino acid
  misc_feature (93)..(93): Xaa can be any naturally occurring amino acid
  misc_feature (103)..(103): Xaa can be any naturally occurring amino acid
  misc_feature (141)..(141): Xaa can be any naturally occurring amino acid
  misc_feature (173)..(173): Xaa can be any naturally occurring amino acid
  misc_feature (421)..(421): Xaa can be any naturally occurring amino acid
  misc_feature (457)..(457): Xaa can be any naturally occurring amino acid
NLFSYSSLSSHLTKSCKSILIKRDHNHRXLSAGEGGISIXMRRLIKEXAAGVDELLVVLGYKVRSSXDIADVAHXLEQLDMVLCDXISNLSDXTVHYNPSDLXSGLVESMLSDLDPTRIQEKPDSVYDLRAIPGSAVYPRXDEHVTRRSKRTIIESELSSTRSVVVLDSQETXVLLFHAFLVFSEGCFIFFFILMLFRPRLVKAREGFTRAPLKAGSLFREKSRLYSRWKGLCEKGFYRILPLDDDVRVVLSFFGTLFQISFSIELFVRYSQSFAQFLAGEINADTCNVFFLRAGERFHGYLILGLNHGLQWPALIKALALRHNAPPDIRLPGIGYSLTDIQEVGWKLGQLASTIGVNFELKSIALNNLSDLNPEMLDISPGFVSVAVHSVFELHRLFAHPGSIEKKKSTIKSIRPEIMTXVEQKENHNGTVFLDRFTESIHYYSRLFDSLEGPPSXDRVMSELFLGRQILNLVACEGEDRVERHETLNQWRNRFGLGGFKPVSIGSNAYKQASMLLALYAGADGYNVEENEGCLLLGWQTRPLIATSAWRINRVE

SEQ ID NO: 279 - protein, 507 aa, Physcomitrella patens
MHDHVKREEVFDGHARIGLNLGVRTYFSTEETAASGLGKRHRTGSPGSQVPTCQAEGCKTDLSTSKQYHRRHKVCELHSKAPNVQVGGQTQRFCQQCSRFHSLEEFDNGKRSCRKRLADHNRRRRKPQPYASVSAGKLAEPIGIKNEDDPSGSNRVNDSKSMIIPLKCRSSPSSVSLEDSDEKPGPVGNSLHFLSCNQGIRRGPGDDQHLSHSGMQMSSQDMKRSEALLSSLSPAPLMLQNAKQQMPLVGGNDNHDQDHSVYQQHLQAISMGQTSGPKLSLSSLGGQLGLSHQAGGRRQTISGQMHNEIETPVPWLRPPNLRSDLTQVIGRQSTMNLQHLMSNDSKSGIISTSANSQEPDVQAFPSSSQNLIPRDIASPEWMLGNMTGQAVRAGSNPFVSSSLNNITGNGQLESVHQIMPLIDSSSEDGRIPSNGGSDQISHRTHTPVEFMREHNTGTDSEPRGDDNNSRSGGSAVGSPDIKYHELHALRPYESVSSSIYDSNHNLL

SEQ ID NO: 280 - protein, 120 aa, Brassica napus
MESVELSLTNMETAVSADGAQNGDDFSVDDLLDFSSNDDVFFEDGAELETQRHKGVSVSLNDETTLKRSNDFSTPCELAVPTDELAELEWLSNFVDDSFTPYSAPTKKPVWLTGDRRHPL

SEQ ID NO: 281 - protein, 619 aa, Physcomitrella patens
MNPSASSNEQQGDPSWATENWDNPGAVGSLDQASRQYTGSNRQEWEWDPMILAQHPGSGGSNDGSDGDRKNQISAGAMSSLRASYNMLSAGLPSNFTHNPLGIFSSAGIRNFGSLDGSGQISTSANLHSVLGSSGIPGLAATSGTGFCNDIRSYERRCDFFAANMHDHRVKREEVSDGHARIGLNLGVRTYFSTEDTAVGRLGKRHRAGSPGFQVPVCQAEGCKDDLSNAKHYHRRHKVCELHSKAPTVTVGGHTQRFCQQCSRFHHLGEFDEGKRSCRKRLADHNRRRRKPQLNASTSGGTSVESIGIIKACDDGHLHAGINRPNDPKSMLNMHSQKNCGSPNSVSLEDSDEKPSLGAKNLKLRTSGPGYCRSPGNDQQSSHSGMQMDSQSMASSEAQTLLSAISLSPPAPLVQHKSKRQLTMLGGTGDYDHENSVYQLYLQGVSSSQTGPNLSLSSLESQLGHQGGGRGQPTSVQSYNGMESAVQWLRPINAQSDSMTKAVNRSGAMNMQHLISTDSKSGITSASANSSNSQEHDVQAFSPSNQSLLPLESRDLSSPEWMMGSITGAQTSRDGSHQYRPSTPMNNLSASEQLEAGDRMLALINTSNQAGSNPGNDGK

SEQ ID NO: 282 - protein, 256 aa, Physcomitrella patens
MSAVDRSTESSWSSRQTGTHWDNSHPQEGGGRSINRSDWNANSWRWDGAALSAQRISRTPHGSGLDSSRDVTHRENGRQRGSADLGLQLDVRATGTAEPNHQVIHIDDDETEVQGQTFFGRHTPSPPSNEPNPYNRGDESPEDDGPLSLKLGGSSYAYEHNGAGKRPRSSSPQSQIPTCQVDGCTADLSRAKDYHRRHKVCEAHSKAPTTLVSRVRQRFCQQCSRFHPLDKFDEDKRSCRRRLAGHNKRRRKTQPD

SEQ ID NO: 283 - protein, 249 aa, Dendrocalamus latiflorus
MGRGKVELKRIENKINRQVTFSKRRNGLLKKAYELSVLCDAEVALIIFSSRGKLYEFGSAGISKTLERYQHCCYNAQDNNALSETQIWYQEMSKLRAKFEALQRTQRHLLGEDLGPLSVKELQQLEKQLECALSQARQRKTQLMMEQVEELRKKERQLGEINRQLKHKLEAEGSSNYRAMHRASWAPGTVVDEGAAYHEQQPPHSAALDCEPPTLQIGYPHQFMPPEAANIPRSAPAGGENNFMLGWVL

SEQ ID NO: 284 - protein, 337 aa, Arabidopsis thaliana
MEPKCDHCATSQALIYCKSDLAKLCLNCDVHVHSANPLSHRHIRSLICEKCFSQPAAIRCLDEKVSYCQGCHWHESNCSELGHRVQSLNPFSGCPSPTDFNRMWSSILEPPVSGLLSPFVGSFPLNDLNNTMFDTAYSMVPHNISYTQNFSDNLSFFSTESKGYPDMVLKLEEGEEDLCEGLNLDDAPLNFDVGDDIIGCSSEVHIEPDHTASPPGQQMNINTGLQLPLSPVLFGQIHPSLNITGENNAADYQDCGMSPGFIMSEAPWETNFEVSCPQARNEAKLRYKEKKLKRSFGKQIRYASRKARADTRKRVKGRFVKAGDSYDYDPSSPTTNN

SEQ ID NO: 285 - protein, 626 aa, Zea mays
  misc_feature (16)..(16): Xaa can be any naturally occurring amino acid
MKREYQNAGGSDGYMXSSKDKSMAAAAAGAGEQEEEVDELLAALGYKVRSSDMADVAQKLEQLEMAMGMGGACPTADDGFVSHLATDTVHYNPSDLSSWVESMLSELNAPPPPLPPATPAPRLASTSSTVTSGTAAGAGYFDLPPAVDSSSSTYALKPIPSPAVAASADPSPDSAREPKRMRTGGGSTSSSSSSSSSMDGGRTRSSVVEAAPPATQAANGPAVPVVVVDTQEAGIRLVHALLACAEAVQQENFSAADALVKQIPVLASSQGGAMRKVAAYFGEALARRVYRLRPAPDGSLLDAAFADLLHAHFYESCPYLKFAHFTANQAILEAFAGCRRVHVVDFGIKQGMQWPALLQALALRPGGPPSFRLTGVGPPQPDETDALQQVGWKLAQFAHTIRVDFQYRGLVAATLADLEPFMLRPEGGGDTDDEPEVIAVNSVCELHRLLAQPGTLDKVLGTVRAVRPRIVTVVEQEANHNSGTFLDRFTESLHYYSTMFDSLEGAGSGSGSGSGSGQPTDASPPAGTDQVMSEVYLGRQICNIVACEGAERTERHETLVQWRGRLGGSGFEPVHLGSNAYKQASTLLALFAGGDGYRVEEKDGCLTLGWHTRPLIATSAWRVAAP

SEQ ID NO: 286 - protein, 371 aa, Dendrobium sp. XMW-2002-2
MWRHSCCYKQKLRKGLWSPEEDEKLLKHITKYGHGCWSSVPKLAGLQRCGKSCRLRWINYLRPDLKRGTFSQQEENLIIELHGVLGNRWSQIAAQLPGRTDNEIKNLWNSCIKKKLRLRGIDPNTHKPLAETEVQLAEIDSADQPAPEPEKHTVQQTETGVPNNSVRPGNSPAASYFSLPDLTYSPDCGGSIGQIQQFWLNQSGKFFSNNNSNSEFSFNSVSSLVPSVPRSTLSTSKELKPLTSLLMENSPSGFYWETGNSSNSSASSGSNDPLFDGSIFQWTQLIPERDINVQLHGETEDLKWSEYLNGSIPLSTELQSQNPELCNGMKAEEQFGIDGLSIWLQNHQQQQQQQQQASNNYGKDSQRDIIC

SEQ ID NO: 287 - protein, 197 aa, Arabidopsis thaliana
MEKEGLGLEITELRLGLPGRDVAEKMMKKRAFTEMNMTSSGSNSDQCESGVVSSGGDAEKVNDSPAAKSQVVGWPPVCSYRKKNSCKEASTTKVGLGYVKVSMDGVPYLRKMDLGSSQGYDDLAFALDKLFGFRGIGVALKDGDNCEYVTIYEDKDGDWMLAGDVPWGMFLESCKRLRIMKRSDATGFGLQPRGVDE

SEQ ID NO: 288 - protein, 351 aa, Antirrhinum majus
MEGGGGSSSNSCMIGFGENTSSNNGFCPMTMMMMPPPSMASSHPNGNTLFFPLPSTNNSHQGLNHRTSASTMLEDQHNNNTITSTGYYFMDGNDNDSVKAKIMAHPYYHKLLAAYINCQKIGAPPEVAVKLEEACASAATMGRNSVSRIGEDPALDQFMEAYCEMLSKYEQELSKPFREAMLFLSRIECQFKALTLSSSDSACGEAMDRHGSSEEEIDVDNSLIDPQAEDRELKGQLLRKYSGYLGSLKQEFMKKRKKGKLPKEARQQLLDWWSRHYKWPYPSESQKLALAEQTGLDQKQINNWFINQRKRHWKPSEDMQFVVMDAAHPGHYYMDNVLGNPFAMDILPTLL

SEQ ID NO: 289 - protein, 379 aa, Oryza sativa (japonica cultivar-group)
MARDDDPAKKLAVDGGVAAAARCCDFCGGLPAVVYCRADSARLCLPCDRHVHAANTVSTRHARAPLCSACRAAPAAAFHRGDGFLCSSCDFDERLRRGSIGGGGDELPLDDRAAVEGYTGCPSIGELAAILGVVGGDSDKPADDGWWSASWEEEAPQVLSLDDIIVPTTSCHGLRPLLTPPSPENQSSPDNGELDGEVVRQLGELARSEAAAQATFVAGDQLASWASPEFTSGHGDFGIEAASTTVPSCENETWIMSTDCTDPTDASKTDIAREEAPASSSAEPCLSSLVEISEICRSMSYSGSGIDNGGHDPSTLAIMPTQALPKKGVYDIAYPDRGTVISRYKEKRKNRFDKQIRYESRKARADGRLRIKGRFAKSN

SEQ ID NO: 290 - protein, 353 aa, Antirrhinum majus
MEGSGGGGMMAFGENNNNNSNNGFCPSNMMMPQLASNCEGGYSTTPFVPLVPFTNHHHHHQEMNRQRSTVVGGSSMVYEEGHQNNSNAITSTGYYFMDSTNCDESSLKAKIMAHPHYHRLLAAYVNCHKIGAPPEVVSRLEEAAAAMARHGTISVGEDPGLDQLMEAYSEMLSKYEQELSKPFKEAMLFLSRIESQFKALTVSAARGEAMFRNGSSEEEIDVNNSFIDPQAEDIELKGQLLRKYSGYLGSLKQEFMKKRKKGKLPKEARQQLLEWWSRHYKWPYPSESQKLALAESTGLDQKQINNWFINQRKRHWKPSEDMQFVVMDAANPQYYMENILGNPFPMDISPALL

SEQ ID NO: 291 - protein, 249 aa, Dendrocalamus latiflorus
MGRGNVELKRIENKINRQVTFSKRRNGLLKKAYELSVLCDAEVALIIFSSRGKLYEFGSAGISKTLERYQHCCYNAQDNNALSETQIWYQEMPKLRAKFEALQRTQRHLLGEDLGPLSVKELQQLEKQLECALSQARQRKTQLMMEQVEELRKKERQLGEINRQLKHKLEAEGSSNYRAMHQASWAPGTVVDEGAAYHVQQPPHSAALDCEPPTLQIGYPHQFMPPEAANIPGSAPAGGENNFMLGWVL

SEQ ID NO: 292 - protein, 266 aa, Tripsacum dactyloides
ASADPSTDSAREPKRMRTGGGSTSSSSSSSSSMDGGRTRSSVVEAAPPATQASAAANGPAVPVVVVDTQEAGIRLVHALLACAEAVQQENFSAAEVLVKQIPMLASSQGGAMRKVAAYFGEALARRVYRFRPPPDSSLLDAAFADLLHAHFYESCPYLKFAHFTANQAILEAFAGCRRVHVADFGIKQGMQWPALLQALALRPGGPPSFRLTGVGPPQPDETDALQQVGWKLAQFAHTIRVDFQYRGLVAATLADLEPFMLQPEGD

SEQ ID NO: 293 - protein, 509 aa, Zea mays
SPKFPAPVLASWRRKMSFRSIVRDVRDSIGSLSRRSFEVTAAAAAGGLSGRTAAQHRRGRSQSTVHELRDTGVVVQQDESRWASLPPELLRDVVRRLEASESAWPNRKHVVSCAAVCRAWREMCREIVLSPEVCGKLTFPVSLKQPGPRDGMIQCFIKRDKSKSTYRLYLCLSTAVLMENGKFLLSAKRSRRTTCTQYIISMDADNISRSSSTYIGKLRSNFLGTKFVVSDTQPPPYRYSGAAPPPPRAAGRRASRRFDSRKVSPKVPTPAGAGGGSYSIAQVTYELNVLSTRGPRRMHCVMRSIPASAVEPGGTVPGQPERILPRALLEEQEEEEDSSSFRRTGTGTTSFSKSSASIMDRSVDFGGSSSSSFRDFSSARFSDIVDGGGGGDGEQDRERPLVLRNKAPRWHEQLQCWCLNFRGRVTIASVKNFQLIAAAPSLQAQAPAAGAGAPLAPSSQPAPQDQDKVILQFGKVAKDMFTMDYRYPLSAFQAFAICLSSFDTKLACE

SEQ ID NO: 294 - protein, 155 aa, Cryptococcus neoformans var. neoformans JEC21
MSEHTNLKSLAPLGNQPEPSANSAGVGPSKPFTEAQVEEFREQDRWLPIANVARIMKSSLPTSAKVSKEAKECVQECVSEFISFITSEAAEKCLNEKRKTLNGEDILTSMRALGFDNYEGVLRVYLAKYRDVTRTGEATSWRHHFDQRPCRGDKV

SEQ ID NO: 295 - protein, 423 aa, Arabidopsis thaliana
MDPLCEFCRVVRAVVYCKSDSARLCLHCDGCVHSANSLSRRHSRSLLCDKCNSQPAMIRCMNHKLSLCQGCDWNPNDCSALGHRRLALNCYTGCPSLAEFSRLWSFVFDANSSLGGWESVGTLPKSESCTSQCLEQTDHNGGYFGLVSDKLDEIESCVRYQPRMDQSQIIPSNPNYTPYCKDEAFFFPQDSNQPKLQECPNLGIHDGNELCEGFNVDNVQLNFEIADEIFYCSQVATRYHLEDGGMDCLLMDKNIAVTESSSLIESAMEASSSIQQDCVAFQSSRAGGSASVMQVINSNTNCALMNPSCTKNISLGFPQGLVHSNMPLQFPNIVGENNSTEYQDCGLSRVGESPWESNLEGTCPQARDKAKMRYNEKKKTRTFGKQIRYASRKARADTRKRVKGRFVKAGEAYDYDPLGTRDI

SEQ ID NO: 296 - protein, 191 aa, uncultured bacterium 560
MVEETSFGKILIIDDEKDNTEIIKDVLEDVNYETILARSASEAKTIVSANTFDLVLLDVWMPGQDGISLLAEWTSEGFDTPIVMMSGHAEPSDIVRAMKLGAIDFLKKPLHDFLPILRNIMTRPEPEKSDQEVKGIDFSLRLKEARNLFESQYLLHHLALNDNNIAIVAEKAGLERTTLYRKLKDLGIDKK

SEQ ID NO: 297 - protein, 199 aa, Zea mays
MARGKVQMRRIENPVHRQVTFCKRRMGLLKKARELSVLCDAAIGVIVISPHGKIYDLATNGNMQGLIERYRRACSEMHGESSNHNETQTIKQEVLALTHEIDLLQKGFRYMHGENDIDHMNLVELQTLENNLEMWANNIRSQKMQIISREIDMLRNKEAILQAVNGVLQERIIEQNGILNFSGTAMTPSQLTMESNYYL

SEQ ID NO: 298 - protein, 645 aa, Arabidopsis thaliana
MDTNTSGEELLAKARKPYTITKQRERWTEDEHERFLEALRLYGRAWQRIEEHIGTKTAVQIRSHAQKFFTKLEKEAEVKGIPVCQALDIEIPPPRPKRKPNTPYPRKPGNNGTSSSQVSSAKDAKLVSSASSSQLNQAFLDLEKMPFSEKTSTGKENQDENCSGVSTVNKYPLPTKQVSGDIETSKTSTVDNAVQDVPKKNKDKDGNDGTTVHSMQNYPWHFHADIVNGNIAKCPQNHPSGMVSQDFMFHPMREETHGHANLQATTASATTTASHQAFPACHSQDDYRSFLQISSTFSNLIMSTLLQNPAAHAAATFAASVWPYASVGNSGDSSTPMSSSPPSITAIAAATVAAATAWWASHGLLPVCAPAPITCVPFSTVAVPTPAMTEMDTVENTQPFEKQNTALQDQTLASKSPASSSDDSDETGVTKLNADSKTNDDKIEEVVVTAAVHDSNTAQKKNLVDRSSCGSNTPSGSDAETDALDKMEKDKEDVKETDENQPDVIELNNRKIKMRDNNSNNNATTDSWKEVSEEGRIAFQALFARERLPQSFSPPQVAENVNRKQSDTSMPLAPNFKSQDSCAADQEGVVMIGVGTCKSLKTRQTGFKPYKRCSMEVKESQVGNINNQSDEKVCKRLRLEGEAST

SEQ ID NO: 299 - protein, 326 aa, Medicago truncatula
MTRRCSHCSHNGHNSRTCPNRGVKLFGVRLTDGIRKSASMGNLSHYSGSGSGLLNTGSNTPGSPGENPDHGADGYGSEDFVPGSSSTSRERKKGTPWTEEEHRMFLLGLNKLGKGDWRGIARNYVISRTPTQVASHAQKYFIRQSNVSRRKRRSSLFDIVADDAPDTSMVPQDFLSANQLQTETEGNNPLPAPPPLDEECESMDSTNSNDGESASAPLKPDSNAQASAYPVVYPAYYSPFFPFPLPYWSGYSPEPAPKKETHEVVKPTPVHSKSPINVDELVGMSKLSLGETIGDAGPSTLSRKLLEEGPSRQSAFHTTPACGTVL

SEQ ID NO: 300 - protein, 226 aa, Triticum aestivum
TTCYAEAGCPFRNSRELFTKGPAISHPLLGGANQRPSSSPFPFFPSVLPGGGGGFFKGFSGAGWRRRTSGTPRVAGGVREQDPFFPIANISRIMKKAVPANGKIAKDAKETLQECVSEFISFVTSEASDKCQKEKRKTINGDDLLWAMATLGFEEYVDPLKIYLQKYRDMEGDSKLTSKSGEGSVKKDIIGAHSGATSSNAQAMVQHGGYAQGMGYMQPQYHNGDT

SEQ ID NO: 301 - protein, 280 aa, Oryza sativa
HIAFPFVPAPSAPFSTADVQRAQEKDIDCPMDNAQKELQETRKQDNSEAMKVIVSSETDESGKGEVSLHTELKISPADKADTKPAAGAETSDVFGNKKKQDRSSCGSNTPSSSDIEADNAPENQEKANDKAKQASCSNSSAGDNNHRRFRSSASTSDSWKEVSEEGRLAFDALFSRERLPQSFSPPQVEGSKEISKEEEDEVTTVTVDLNKNAAIIDQELDTADEPRASFPNELSNLKLKSRRTGFKPYKRCSVEAKENRVPASDEVGTKRIRLESEAST

SEQ ID NO: 302 - protein, 139 aa, Brassica rapa subsp. pekinensis
MRKGRGSSAVPPALHGSVKEPRYRGVRKRPWGRFAAEIRDPLKKSRVWLGTFDSAVEAARAYGAAARNLRGSKAKTNFPIDCSPSSPLQPPNYQNHHRNLAPNQNQMDPFMDHRLYGGGGGSFPEQQQVISRPASSSLS

SEQ ID NO: 303 - protein, 247 aa, Glycine max
  misc_feature (162)..(162): Xaa can be any naturally occurring amino acid
  misc_feature (227)..(227): Xaa can be any naturally occurring amino acid
  misc_feature (238)..(238): Xaa can be any naturally occurring amino acid
LHNANTIHFNLHSQITLPSIPLTTITTTKPFPHNRHFPRIQCCSNNNNNNSIEIDMVKNSQGIYAPKASKVVVLWDLDNKPPRGPPYDVAISLKTLAARFGDLVDFSAYANRHAFVHLPQWVLQQRRDRKNLDILERKGIITPPEPYTCGVCGRKCKTHLDXKKHFKQLHQRERQKKLNRLKSLKGKKRHRFKERFLRGNHKYDDAARTLVVPKVGYGLAAELRRAXVFVKTVQDKPXAADWALKEQ

SEQ ID NO: 304 - protein, 235 aa, Matricaria chamomilla
MIRNNAFDSDFALLESVRRHLLDDNAPPMSCRSNNFLFPHLSDSWGELPLQQNDSEDMLIAKFLNEALPLQQNDSEGIITPEMTSSSENIFFVKSEPETSSFQPKSLGSQKGKHYRGVRRRPWGKYAAEIRDPAKNGARVWLGTYETAEDAAVAYDMAAYRMRGSRALLNFPLRINSGEPEPVRITSKRKTTSPSEGLVVKKVKVELEMSTQAEFPLVYGCYYCVILGPFLVKCF

SEQ ID NO: 305 - protein, 84 aa, Prunus armeniaca
DLAVALEKLFGCFGIGEVLKDAENCEFAPIYEDKDGDWMLVGDVPWEMFTESCKRLRIMKRSDAKGFGLQPKGFLKATMKDDPI

SEQ ID NO: 306 - protein, 209 aa, Brassica napus
  misc_feature (193)..(193): Xaa can be any naturally occurring amino acid
MTISDQFPCGLRVLVVDDDASCLIILEKMLLRLMYQVTICSQADVALTLLRERKGCFDLVLSDVHMPGMNGYKLLQQVGLEMDLPVIMMSVDGRTATVMTGINHGACDYLIKPIRPEELKNIWQHVVRRKCTINKNSISSSSSSLGSLFSVSGVSEGSLKRRKNKRRVDSEEDDLLDPGNSSKKSRVVWSMEXHQQFVKAINHLGIEKA

SEQ ID NO: 307 - protein, 143 aa, Brassica napus
  misc_feature (78)..(78): Xaa can be any naturally occurring amino acid
TQSGAQPTLFQKRAAMRQSSGSKMGNSESSGMRRLSDDGDMDETGVEVSGLNYESDELNESGKASESVQNGGGKGKKXGMPAKNLMAERRRRKKLNDRLYMLRSVVPKISKMDRASILGDAIDYLKELLQRINDLHKQLESTP

SEQ ID NO: 308 - protein, 289 aa, Oryza sativa
MAGVTSKRRSSSASTSSSSGDGAAVSDRPRGVTRKRRSGGRCPRPAASLRPAAPRPSSHHTAGLRVILQKELRYSDVSQLGRIVLPKKEAEAYLPILTSKDGKKSLCMHDLQNAQLWTFKYRYWPNNKSRMYVLENTGDYVRTHDLQLGDSIVIYKDDENNRFVIGAKKAGDQQAATVPQVDEHISTLFPIFPIAQVDDYLSPMAPQVDISAFVPHADENHEIFDGILNSLPEIPVANVRYSDFFDPFDDGMDMANTLNANANQSASLHVTDDKSGHSLIPNPKSGPHM

SEQ ID NO: 309 - protein, 311 aa, Triticum aestivum
SAQLQPTEHRPNPGRQQSTARMLLNPASEAMVLDSIRQHLMEDTAAPAPEARRQRPAYCRSASFGSLVADQWSESLPFRADDSDDMVVYGALRDAFSCGWLPDGSFAAVKPEPLLPSPDSCYVGFLEPETPPATSPGGSEEEAAAAFMGEEAAAAVARGKHYRGVRQRPWGKFAAEIRDPAKNGARVWLGTYDTAEDAAVAYDRAAYRMRGSRALLNFPLRIGSEIAAAHAAAAAAGDKRPSPEPATSDSSSSSSSSGSPKRRKRGEAAAASMAMALVPPSSQLSRPAHAWYPAVPAEQVAMAPCVQQLVS

SEQ ID NO: 310 - protein, 319 aa, Zea mays
  misc_feature (160)..(160): Xaa can be any naturally occurring amino acid
GCWRFNSLPFQFPHTHVSAHSLLQFRQLVIINRTQSSRFHSRMLLNPASETSVLDTIRQHLLEEPAAAEARPADESFGSLVADQWSGSLPFRTDDADDMVVFGALQDAFAYGWLPDGSFVHVKPEPVRSPDSSSYHPCSYDGSPCFGLLDPEPPLTPGSXTPGRGQEEAAAAMARGKHYRGVRQRPWGKFAAEIRDPARNGARVWLGTYDTAEDAALAYDRAAYRMRGSRALLNFPLRIGSGDKRPSPAPPEPTTSSDSSSSSASGSHKRRKRGEAAAANMAMALVPSPSQLNRPAQPWFPAAPVEQAAMAPRVEQIVV

SEQ ID NO: 311 - protein, 145 aa, Triticum aestivum
AYLGDTIEQVCTKKQAGTGPEFPGYRRPTRPLRAWWKEKVRFDRNGPAAIAKYQADNAMPGSESELASGTTSPHSLQELQDTTLGSLLSALMQHCDPPQRRFPLEKGISPPWWPSGDEEWWPELGIPKDQGPPPYKKPHDSKSWK

SEQ ID NO: 312 - protein, 216 aa, Dendrobium sp. XMW-2002-8
MGRSPCCEKAHTNKGAWTKEEDERLVAYIKVHGEGCWRSLPKAAGLLRCGKSCRLRWINYLRPDLKRGNFTEEEDELIIKLHSLLGNKWSLIAGRLQGRTDNEIKNYWNTHIRRKLLSRGIDPTTHRPLHGQADASFVNEVEKVVSFRRREDENKSSNSSSSNSRSNSEEAKRWRCPDLNLELCISPPLQKQEDSEEDMMREEFGLCFTNGLLEFR

SEQ ID NO: 313 - protein, 913 aa, Zea mays
MDLDPAYPTSACADAWPFDSLTTSLFFSPQLTPIPANSSSSWLTPHSPLWLFEDRHLLPLDAPAVFEEVQRPRSGNSHTSSKPAEQISHRWQFHLSLDEDGTDNSSFFKEKLTQALRYFKESTDQHLLVQVWAPVKNGDRYVLTTSGQPFVLDHQSIGLLQYRAVSMMYMFSVDGENAGDLGLPGRVYKQKVPEWTPNVQYYSSGEYQRLNHAISYNVHGTVALPVFDPSAQSCIAVVELIMTSKKINYACEVDKVCKALEAVNLKSTEILDHPNVQICNEGRQAALVEILEILTVVCEEHKLPLAQTWVPCKYRSVLAHGGGLKKSCLSFDGSCMGEVCMSTSDVAFHVIDAHMWGFRDACVEHHLQRGQGVSGKAFISHKPCFSKDIRKFCKLAYPLVHYARMFGLSGCFAICLQSSYTGNDDYILEFFLPLDCIDEDDQNALLESILTLMKRCLRSLKLVDDNDLSGVSLHLSNVLKLENEESKTDAQFDGSLRESPEDDRHGGSHKFDNENQKVLDITEGQLLTDDYSQDNGTSVGRPNGSGASDSSLLHKTNKPPERRRGKAEKTISLEVLQQYFSGSLKNAAKSLGVCPTTMKRICRQHGISRWPSRKINKVNRSLSKLKQVIESVQGSDAAFNLTSITGPLPIPVGPSPESLNVEKLTQSKVAELSNLAVGVDRDSLQKSLENDDHFDIVMAQQGFIDNNNDVQLEADKASHSRSSSGEGSINSRTSEGSCQGSPANQTFVCKPIASMFAEPQLNQEEFNKEPFQEPQLPLSRMLIEDSGSSKDLKNLFTSTSDQPFLAPPNNLVSMKHSGTVTIKASFKEDIVRFRFPCSGGVIVLKEEVAKRLRMDVGTFDIKYLDDDHEWVKLACNADLEECMEISRLSGSHVIRLLVSDIAAHFGSSCGSSG

SEQ ID NO: 314 - protein, 527 aa, Oryza sativa
  misc_feature (88)..(88): Xaa can be any naturally occurring amino acid
MMGGGLVMDQGMMFPGVHNFVDLLQQNGGDKNLGFGALVPQTSSGEQCVMGEGDLVDPPPESFPDAGEDDSDDDVEDIEELERRMWRXMKLKRLKELQLSRGKDPAGGVVGDPSKPRQSQEQARRKKMSRAQDGILKYMLKMMEVCRAQGFVYGIIPEKGKPVSGASDNLRGWWKEKVRFDRNGPAAIAKYQADNAVPGFESELASGTGSPHSLQELQDTTLGSLLSALMQHCDPPQRRYPLEKGVPPPWWPTGDEEWWPELGIPKDQGPPPYKKPHDLKKAWKVSVLTAVIKHMSPDIEKIRRLVRQSKCLQDKMTAKEISTWLAVVKQEEELYLKLNPGARPPAPTGGITSAISFNASSSEYDVDVVDDCKGDEAGNQKAVVVADPTAFNLGAAMLNDKFLMPASMKEEATDVEFIQKRSASGAEPELMLNNRVYTCHNVQCPHSDYGYGFLDRNARNSHQYTCKYNDPLQQFFIRDDTPFGNQMGDINGASEFRFGSGFNMSGAVEYPGAMQGQQKNDGSNWYY

SEQ ID NO: 315 - protein, 220 aa, Dendrobium sp. XMW-2002-10
MGRSACCEKAHTNKGAWTKEEDERLIAHIRTHGEGCWRSLPKAAGLLRCGKSCRLRWINYLRPDLKRGNFTDEEDELIIKLHSLLGNKWSLIAGRLPGRTDNEIKNYWNTHIRRKLLNRGIDPATHRPVSTATASNLTMSFSSGSSVKDKRTSSSSSSSRVGRISALLPRCPDLNLDLCISPSLEEQMPQDLLVEESNCGGEFLRLGSSFLLDYRSLEMK

SEQ ID NO: 316 - protein, 348 aa, Glycine max
MGRPPCCDKVGIKKGPWTPEEDIILVSYIQEHGPGNWRSVPTNTGLSRCSKSCRLRWTNYLRPGIKRGNFTPHEEGMIIHLQALLGNKWAAIASYLPQRTDNDIKNYWNTHLKKKLKKFQAALDPHSASDSTASGQFLPKSFSDRRSLDISSSNNNHGSSIRLSHQSQSSSTTYASSTENISRLLEGWMRSSPKPLKGSSSQDDEDIQLQGINDDDKNNNNFESTTKLVNLHHLQHKVRNKDEHQEGGGGGVDNMVSHEEFDSILSFENLNNAAWDKSTCDSMPEKSSEAAAEYSVDHHHDIAAHERNNIRQKSENSGAPPLSFLEKWLLDESVGHQVEEMMELSPMF

SEQ ID NO: 317 - protein, 429 aa, Arabidopsis thaliana
MSFLSIVRDVRDTVGSFSRRSFDVRVSNGTTHQRSKSHGVEAHIEDLIVIKNTRWANLPAALLRDVMKKLDESESTWPARKQVVACAGVCKTWRLMCKDIVKSPEFSGKLTFPVSLKQPGPRDGIIQCYIKRDKSNMTYHLYLSLSPAILVESGKFLLSAKRSRRATYTEYVISMDADNISRSSSTYIGKLKSNFLGTKFIVYDTAPAYNSSQILSPPNRSRSFNSKKVSPKVPSGSYNIAQVTYELNLLGTRGPRRMNCIMHSIPSLALEPGGTVPSQPEFLQRSLDESFRSIGSSKIVNHSGDFTRPKEEEGKVRPLVLKTKPPRWLQPLRCWCLNFKGRVTVASVKNFQLMSAATVQPGSGSDGGALATRPSLSPQQPEQSNHDKIILHFGKVGKDMFTMDYRYPLSAFQAFAISLSTFDTKLACE

SEQ ID NO: 318 - protein, 391 aa, Methylococcus capsulatus str. Bath
MRILLVDDDPIAVLAVAVYLRKLGYEVTSARDGREALERFRSQRFEFVISDWNMPHLNGEELCRQVRSLKLPHYVYFILLTGRDDKDSLLRGMEAGADDFLVKPVDREELRARIRAGERILRLEQQLDQRGRLLEDMNRELKQAYQTIRNDLATAAAIQKSLLPEPWTLPDLEVRSLFVASDFLAGDMFGYFPLDDRRVGLFQLDVSGHGVSAALISVALSKCLLQSRSLDVTAEGPPAPTCGSLPPNRMLEELNRFFAGQPEANSYFATMIYALLDRETGRLDLSTAGHPPPLMWKGETGDIVESGVRGLPLGVLADRRYACESHRLAAGDRFFAYSDGITECMNPRRGGFRRRTLPASAGRNRLSAIGRSDRLHRSVAVGLAGPRQLHR

SEQ ID NO: 319 - protein, 721 aa, Petunia x hybrida
MIAIPQGAKGVLGVSSFMPSISSEEQICKKDANFARNDPQICKKDGNFARNEPQICKKEGNFTRNEPVSVLDTRSPSPSSSSCSYAGKVEGQKEELVKELQPFPLVGLEPEKCSLGFGDLDNLLPELCGADQTLLRWISGDMEDPSVSLKQLLLGGNANGFHGSSGFEASAAGSLVHTDNVSFSGSDVSLNANIEKIGSVIDSNGRPSNGFDYLNANLYAKSLPLPPASSFQEQKLGQKPQSFSPNQALFQNASYGNMFDSSSYDDTNQEQPPSKRHNSGTLGSSVGGLLPKVPFFDPSGDLSMRRQLLGEMQQHFNLLPPQQFQPKPLIVPKLEAACGGGNGSLMVPRHQQQEQQFIYDQIFQASELLLAGHFSNAQMILARLNQQLSPIGKPFKRAAFYFKEALQLPFLLPCTSTFLPPRSPTPFDCVLKMDAYKSFSEVSPLIQFMNFTSNQAILEALGDVERIHIIDFDIGFGAQWSSFMQELPSSNRKATSLKITAFASPSTHHSVEIAIMHESLTQFANDAGIRFELEVINLDTFDPKSYPLSSLRSSDCEAIAINFPIWSISSCLFAFPSLLHYMKQLSPKIIVSLERGCERTELPLKHHLLHALQYYEILLASIDAANVTPEIGKKIEKSLLLPSIENMVLGRLRSPDRMPQWRNLFASAGFSPVAFSNLTEIQAECVVKRTQVGGFHVEKRQSSLVLCWKQQELLSALTWRC

SEQ ID NO: 320 - protein, 310 aa, Arabidopsis thaliana
MMVDENVETKASTLVASVDHGFGSGSGHDHHGLSASVPLLGVNWKKRRMPRQRRSSSSFNLLSFPPPMPPISHVPTPLPARKIDPRKLRFLFQKELKNSDVSSLRRMILPKKAAEAHLPALECKEGIPIRMEDLDGFHVWTFKYRYWPNNNSRMYVLENTGDFVNAHGLQLGDFIMVYQDLYSNNYVIQARKASEEEEVDVINLEEDDVYTNLTRIENTVVNDLLLQDFNHHNNNNNNSNSNKCSYYYPVIDDVTTNTESFVYDTTALTSNDTPLDFLGGHTTTTNNYYSKFGTFDGLGSVENISLDDFY

SEQ ID NO: 321 - protein, 216 aa, Triticum aestivum
VDHLEQQRAMAMAVASSTMEVDQDLPGFRFHPTEEELLGFYLSRVALGKKLHFDIIGTLNIYRHDPWDLPGMAKIGEREWYFFVPRDRKAGSGGRPNRTTERGFWKATGSDRAIRSTGDHKRVIGLKKTLVFYQGRAPRGTKTDWVMNEYRLPDNGAAPPQEDTVLCKVYRKATPLKELEQRAFQDGGDEARVRRQRWVRLQWRNKVPVRKPDFTF

SEQ ID NO: 322 - protein, 142 aa, Pinus strobus
EEVEDGSGGETDFQEVDHHAVEDRELKDHLLRKYSGYLSSLKQEFMKKKKKGKLPKDARQKLLDWWTVHYKWPYPSETEKIALAECTGLDQKQINNWFINQRKRHWKPSEDMQLMAMDGQSPHGATLYVERHLMTEGYHLDC

SEQ ID NO: 323 - protein, 255 aa, Zea mays; identical to SEQ ID NO: 175

SEQ ID NO: 324 - protein, 142 aa, Picea glauca
EEVEDGSGGETDFQEVDHHAVEDRELKDHLLRRYSGYLSSLKQEFMKKKKKGKLPKDARQKLLDWWSLHDKWPYPSETEKIALAECTGLDQKQINNWFINQRKRHWKPSEDMHFMVMNSHSPHSAALYVERHLMTEGYHLDC

SEQ ID NO: 325 - protein, 424 aa, Triticum aestivum
MDMNESSEKGMEGNGSSGPGGGIPVEWQSQFSGGGFSAHQHQQHPHMMDSFGSGMWSAASQHGAGFLAPVPGFLPPPGLGGHFPVDSGFIERAARSSCFVGPGAGGGMMGAGAFGGAGDQQMGSAFGEGYLDHRRKEGGDKAEPELAGSGGVPSSEAAGGDCSSKGSDSKKRRRPSEVMGGDQVQSSNVAADSANESAQSKDKGEESSPATGTTTGGKSKGKGAKESSEKEDYIHVRARRGQATNSHSLAERLRREKISERMKLLQDLVPGCSKVTGKAVMLDEIINYVQSLQRQVEFLSMKLATVNPRLDLNIEGLLSKDLLRFPGVSSSSMGFSPEMMHPQLQLSQPGLMQGGAAAMANSDVFRRIMQAQLGAKDGSHSQMAHALNGPFSDHVAQMAYPSMGSSHSHSQDLSIRPSQDAYQM

SEQ ID NO: 326 - protein, 155 aa, Brassica napus
  misc_feature (146)..(146): Xaa can be any naturally occurring amino acid
MATQDSQGIKLFGKTITFNASNITTTTIKKEVHQQQPELQATTDVRSSSTDLTAVEKRPDKIIACPRCKSMETKFCYFNNYNVEQPRHFCRGCQRYWTAGGALRNVPVGAGRRKAKHPGRVGGFAEFLGAATGAVDQVELDALLVXEWRAAASHG

SEQ ID NO: 327 - protein, 461 aa, Acidobacteria bacterium Ellin345
MTAKAEILIVDDEANTLASLSRAFRLAGHEATVCDNAVRALEIAKSKPFDLILSDVVMPGRDGLTLLEDLKTAGVQAPVVMMSGQAHIEMAVKATRLGALDFLEKPLSTDKLLLTVENALKLKRLETENRDLRSRVGKHEIVWKGEAMRRVMAQIDRVAASEARVCIYGETGTGKELAARTLHEKSPRKAGPFITLNCAAVPAELIESELFGHEKGSFTGAAQRHIGKFEQAHRGTLFLDEIGDMPLAMQAKLLRVLEEGEVERVGGDKSIPVDVRVIVATHRNLEDLVKEGKFRQDLFHRVYVFPLILPPLRTRREDIPVLLEHFAAQVCLQNGWKPVPFTAEAVEALQRYSWPGNVREMRNVVERLLLLAVAGEVDRATVELALPEAQTATSDTGSGPLSSRVAQYEREVILAELQRQKHHITNTAKALGLERSHLYKKCQALGIDLRAVRGTAPGAVR

SEQ ID NO: 328 - protein, 222 aa, Zea mays
MPDSDNDSGGPSNAGGELSSPREQDRFLPIANVSRIMKKALPANAKISKDAKETVQECVSEFISFITGEASDKCQREKRKTINGDDLLWAMTTLGFEDYVEPLKHYLHKFREIEGERAAASAGASGSQQQQQQGELPRGAANAAGYAGYGAPGSGGMMMMMMGQPMYGGLPPQQQPPPPQPPQQQQQHQQHHMAIGGRGGFGQQGGGGGSSSSSGLGRQDRA

SEQ ID NO: 329 - protein, 294 aa, Oryza sativa
  misc_feature (209)..(209): Xaa can be any naturally occurring amino acid
MTSNNSTNEELGGGGRKAADKPSGGGGAAAAVASSRHWSASTESRIVRVSRVFGGKDRHSKVRTVKGLRDRRVRLSVPTAIQLYDLQDRLGLSQPSKVVDWLINAAQAEIDKLPPLQFPPHDHDLVAAAASSMAPPPFANGGDGHHGASASSMLEDGDKAAGGGGMKAFMSLSNSLGLLNAATMPATLAAHHHHHHHAAAYYAAAESWXNGGNGVHHHDVSHGVSPSAHNSPFPSLLSLAPGSHHQFVFYSPEGGGFAVKEAAAEQFPVDSLDHSQGQLTLSSARSFLHSGSQG

SEQ ID NO: 330 - protein, 427 aa, Malus x domestica
MAYHNHLSQDLPLHHFTDQTHHQHQQYQSDQPDPNSKPPEPHHSFQPAPNWLNSALLRNFTNTDTNPTNSNNANNNGGGVSNFLNLHVTASDSAASQASNQWLSQSHRPILHRNHSDVNDDVTVAGDSMIAAALSHDSADLKPDSILNKNEGGGGDGGVMNWQNARHKAEILAHPLYEPLLSAHVACLRIATPVDQLPRIDAQLAQSQNVVAKYSALGNGMVGDDKELDQFMRNYVLLLCSFKEQLQQHVRVHAMEAVMACWEIEQSLQSLTGVSPGEGTSATMSDDEDDQVDSDANLFDEGMEGHDSMGFGPLIPTESERSLMERVRQELKHELKQGYKEKIVDIREEILRKRRAGKLPGDTTSVLKAWWQSHSKWPYPTEEDKARLVQETGLQLKQINNWFINQRKRNWHSNPSTSTVLKSKRKR

SEQ ID NO: 331 - protein, 534 aa, Lemna paucicostata
METCSSGEELVIKPRKPYTITKQREKWTEEEHNRFLEALKLYGRAWQRIEEHIGTKTAVQIRSHAQKFFTKLEKEAVSKGVPLGQVHDIDIPPPRPKRKPNNPYPRKLGVGPTCPSGSEREDNKTLTHLPSLNSKGKAEDSPESSHENQAGIKPDKKTPESPVILSLFHVAPPPSTPSSSKSPVSSLGKGMAEENNPKICHVDRVNPKLPSPSAISSVHQSHPFSWPHIPPAFSTHLTSALVQNPAAHAAANLAASYWLSADVEAASSVDSASSASPTMAAAAAATVAAASAWWATQGLLPFCYPSFNGCFAAFAPPPTPITLTESTGVKVNPNVEEQEEQGRSKGSPLSSTDSNPSEKREVNGEGEVKVQGQSLTQREEKSTLEGKNQLDRSSSGSNTPGSEVENEGVEPTEDEMPKEEAVDPTRRGVDPRKEVSKEGRLAFQALFSREVLPQSFSPTETEDQKEQKSTEVNPHPEVNPVDRIPAELSQHRLKPHCTGFKPYKRCSVEAKQTEPPPEEDKCSKRICLEREASI

SEQ ID NO: 332 - protein, 1440 aa, Arabidopsis thaliana
MANSRIYPQFFHTLVPSFHTHLMIPEDFFSEYIEGRSVAELKLDFSDKSWEVKLSDRRITDGWEEFVVANDFRIGDVVAFRYVGNLVFHVSNLGPNYYEIEHNDELPKEKKAKTNSEEADAVSSSSSADKSCFMAIITALDLTTDTLYLPLHFTSANGLTRKNREIILTDGGERSRVLDLRFDESSGTFYISRGWRNFCDENGQKAGGFFLFKLVGKGETLVLSFCPTESINGEENITREDSKDECSSLDSLMNIVEKKKYIPKPRGSPYSSYSPSHKQFVTFTLPPDYARIGKLSLSAPFVRENGINKPGEICLLDKHGRKWLTSLLLDSKGTMSLGKGWKEFVKANSLETGFTLKLIWEETTPVLSLCSPESNSDREQEEISKAIEKHSLFIDPSNRDKISNNDKEENMSWERKKDHLKSRDSTLSSQKQFVTITITPSSDRLVSLSNDSCLVVVSLLYFDMRLPKVFTRENGINKPGRITLLGKDGIKQQTNLLFDKANGAMSLGHGWKDFVKDNGLKTGDSFTLKLIWEDQTPVLSLCPADCSIDREAGGGRSETNQKKSLPIEPSTCKKIRKDVNIKDDNSKEKNDKEESKSVDGERKYLRGTYLTPSSQKHFVTLTITPSSIKKDRLILSPQFARKNNIDKPGMIYLLDTDGTKWLISLQRDKKGTMSLGKGWKEFAEANDFKLGESFTMELVWEDTTPMLSLLRTEFRSSKANEKESISSEHKTRESSPTIKNRIVTPALTPEDVKACKLVTSSNYSCFSEILSAQFARENNINQPGTIYLLDTDGRKWLTTVKRDKKGTMSLGKGWKEFADTKDLKSGDSFTMELIWEDTNPVLSLLRTKFSSSKSNKEESIFLEPKSRDSSSPTIVNRFVTLALTPEDVTACKLILPSQFMKANGINNKLGKITLLGENGVEWPGYMLSLDGTLALGNGWEGFCEANGVKLGQTFTLEFVNEQDTTTTPRIPVAFFLKNIEGRYEQKTAELRSDASKITWEVKIDGQRLTDGWKEFALSHDLRIGDIVVFRQERDMSFHVTMLGPSCCEIQYGSCSDEERNLEKKKNPNGEAKSSSLDPSCFSANVAPSSLRYDLMLFPMGFVRENGVVGSGKIVLMNEKGRSWNFNLRQKPSCGTVYVRGGWVSFCDANGLQAGDIYTFKLIKRGGTLVLRLLPKGAESCSLDPSCFVANVAPSTLRYDTLYLPKRFMRENGVDKRRGEMILMNEKGKSWTLDLKLKKSCGTSLIRRGWRSFCSANGLRAGSIITFKLIKKSGTLVLCLLSNEPEEEVCSEANEVESLSTDQESHEESSHNEKISRRKEKKGRMIWKASSSPSENRFVTLNLTPYNILRSALRLPIPFTRMNGINEETKMTLLDKHGMKWLTTLRLVDYKRKRLGMVGGWKGFIQANGVKANESIMLELIWEEETSCVLKFCSKVKLAIK

SEQ ID NO: 333 - protein, 516 aa, Arabidopsis thaliana
MMNKDMLLHQHQQPQQDENMSNLTSASGDQASVSSGNITEASGSNYFPHHQQQQEQQQQQRQQLFVPDSQPQKKRRNQPGNPDPESEVIALSPKTLMATNRFVCEICNKGFQRDQNLQLHRRGHNLPWKLKQRSNKEVIRKKVYVCPEASCVHHDPSRALGDLTGIKKHFCRKHGEKKWKCDKCSKKYAVQSDCKAHSKTCGTKEYRCDCGTLFSRRDSFITHRAFCEALAEETAREVVIPQNQNNNQPNPLLIHQSASHPHHHHQTQPTINVSSSSSSSHNHNIINSLHFDTNNGNTNNSNNSNNHLHTFPMKKEQQSNDHIMNYHHSIIPPWLAPQPHALTSSNPNPSNGGGGGGSLFSLASPAMSATALLQKAAQMGSTKTPPLPPTTAYERSTHNNNLTTTMAAMMTSPSGFISSNNNNHVLFQDYNASGFDNHGGEEAFDDTFGGFLRTNEVTAAAGSEKSTKSGGGEGLTRDFLGLRPLMSHNEILSFAGLGSCINSSASDQLHPKPWQG

SEQ ID NO: 334 - protein, 910 aa, Arabidopsis thaliana
MVTTGNSRYERGNGNREIKTKEGIKWTTEASFELFQRRIWRFLVDIVCLEAYLVPDETDLSFGRYGEFGGFNESDPKETRNVSVAGEGQKSNSTRSAAAERALDPEAALYRELWHACAGPLVTVPRQDDRVFYFPQGHIEQVEASTNQAAEQQMPLYDLPSKLLCRVINVDLKAEADTDEVYAQITLLPEANQDENAIEKEAPLPPPPRFQVHSFCKTLTASDTSTHGGFSVLRRHADECLPPLDMSRQPPTQELVAKDLHANEWRFRHIFRGQPRRHLLQSGWSVFVSSKRLVAGDAFIFLRGENGELRVGVRRAMRQQGNVPSSVISSHSMHLGVLATAWHAISTGTMFTVYYKPRTSPSEFIVPFDQYMESVKNNYSIGMRFKMRFEGEEAPEQRFTGTIVGIEESDPTRWPKSKWRSLKVRWDETSSIPRPDRVSPWKVEPALAPPALSPVPMPRPKRPRSNIAPSSPDSSMLTREGTTKANMDPLPASGLSRVLQGQEYSTLRTKHTESVECDAPENSVVWQSSADDDKVDVVSGSRRYGSENWMSSARHEPTYTDLLSGFGTNIDPSHGQRIPFYDHSSSPSMPAKRILSDSEGKFDYLANQWQMIHSGLSLKLHESPKVPAATDASLQGRCNVKYSEYPVLNGLSTENAGGNWPIRPRALNYYEEVVNAQAQAQAREQVTKQPFTIQEETAKSREGNCRLFGIPLTNNMNGTDSTMSQRNNLNDAAGLTQIASPKVQDLSDQSKGSKSTNDHREQGRPFQTNNPHPKDAQTKTNSSRSCTKVHKQGIALGRSVDLSKFQNYEELVAELDRLFEFNGELMAPKKDWLIVYTDEENDMMLVGDDPWQEFCCMVRKIFIYTKEEVRKMNPGTLSCRSEEEAVVGEGSDAKDAKSASNPSLSSAGNS

SEQ ID NO: 335 - protein, 139 aa, Pinus strobus
EDGSGGETDFQEVDHHAVEDRELKDHLLRKYSGYLSSLKQEFMKKKKKGKLPKDARQKLLDWWTVHYKWPYPSETEKIALAECTGLDQKQINNWFINQRKRHWKPSEDMQLMAMDGQSPHGATLYVERHLMTEGYHLDC

SEQ ID NO: 336 - protein, 201 aa, Triticum aestivum
SPPPAPSSSPSPDPETRERAARRQPLPLSPSKRQAPSPMARPQQRYRGVRQRHWGSWVSEIRHPLLKTRIWLGTFETAEDAARAYDEAARIMCGPRVRTNFPDDAAPSSSFLSPALVAKLHRFNVACGSQAGQQQDKDASTSSVGVDPRSPPAPFAGYTGNASAAAASAAAGWSGGFLEEQYVEQMIEELLDSNFSMEISY

SEQ ID NO: 337 - protein, 720 aa, Rheum australe
MMNLWSSDDNVAFADAFMSLDSSSAAAWPPAPSSHQYNHQYNLQHQQQLQHQPQQQQQQQQMANSAGGGWQQAMAGGAQMNPAQMMNQDSLQQRLQALIDDARESWTYAIFWQCNVEPTGQSLLGWGDGYYKGDDSANKNASSAAPAAGSRPPKNPAEQEHRRRVLRELNSLISGSSSPQNDAVDDDVTDTEWFFLISMTQAFPFGVDLPGQAILGSNPIWAYGSDRLAGSPWDRARQGAAFGLQTIVCIPSGTGVLELGSTELVFNSSVLMNKVRVLFNFGSGDASLLTAAASSSAPAAAPPPPISTATTDEAENDPAALWISDPSSSAAEVKEALNPRITVRESSIPIGSNSIPVHQPAKPPQLDVQSSIGLTENSIGIHSQKSHNQPLQHQGFFTKELNFSEFAMKPESGEILNFGESKRNSLGNGNGLNSQFLVEESNKNIISKKRSPTSRGSAEEGMLSFTSSVVLPSSMAVKSSATGAGDSDHSDLEASVVKEADSSRVVDPEKRPRKRGRKPANGREEPLNHVEAERQRREKLNQRFYALRAVVPNVSKMDKASLLGDAISFINELKSKLQNVESEKETLLSQVECLKTEVLASRDHQSRSSNGGGGVQNHHHPSLEQDMNMLNGSCKQSDLDVDVKIIGRDAMVRVNCSKSNHPAARLMVALKELDLEVTHASVSVVNDLMIQQATVRMGSRYYSPDHLRMVLEAKVSDIRG

SEQ ID NO: 338 - protein, 422 aa, Oryza sativa
  misc_feature (349)..(349): Xaa can be any naturally occurring amino acid
  misc_feature (369)..(369): Xaa can be any naturally occurring amino acid
MNNVEEKAASDSKDENEKTANDESGQDKVLKKPDKILPCPRCNSMDTKFCYYNNYNVNQPRHFCKNCQRYWTAGGTMRNVPVGAGRRKSKSSSLHYRHLLMAPDCMMGSRVEISKSMNPEAFASAHSTPIQPIGRNETVLKFGPEVPLCESMASVLNIQEQNGTNAAAVPTGENQEDNSCISSITSHNVLPENAAQVDKNSTPVYCNGVGPVPQYYLGAPYMYPWNIGWNNVPMMVPGTSMPESASQSESCSTSSAPWMNMNSPMMPVASRLSAPPFPYPLVPPALWGCLSSWPATAWNIPWIRTNGGCMSPSSSSNSSCSGNGSPLGKHSRDSSLPLKEDKEEKSLWXVPKTLRIDDPDEAAKSSIWXATLGIKPGDPGIFKPFQSKGESKGQAASETRPARALKANPAALSRSQSFQETS

SEQ ID NO: 339 - protein, 134 aa, Picea mariana
EVEFHEVDPHAEDRELKDQLLRKYSGYLSSLKQEFLKKKKKGKLPKEARQKLLDWWTRNYKWPYPSESQKIALAESTGLDQKQINNWFINQRKRHWKPSEEMQFVVMDSPNPHNAAFFLEGHLRTDGTAFSMDC

SEQ ID NO: 340 - protein, 251 aa, Glycine max
MYGRSDSYESDLALLDSIRRHLLGESELIFGAPNFGSGRSSSFSSLDSCLSDDWGELPFKEDDSEDMVLYGVLRDAVNVGWVPSLDAGSPESVSSGFPAVKLEPDVMPALINPCPPPAPAVEEKKVVPPKGKHYRGVRQRPWGKFAAEIRDPAKNGARVWLGTFETAEDAALAYDRAAYRMRGSRALLNFPLRVNSGEPDPVRVTSKRSSSPESMAAAAPKRKKVMVVGTVQEQVGSQVVECTRGEQLLVS

SEQ ID NO: 341 - protein, 134 aa, Phyllostachys acuta
KKHVMSERRRREKLNEMFLILKSLVPSIHKVDKASILAETIAYLKELEQRVEELESNREPSRPSETRGRRRHEIAGISGAKRKASSEPGGRDVERERLWALSMDGPSNVNVTVMDKEVLLEVQCGWKEMLMTRV

SEQ ID NO: 342 - protein, 541 aa, Oryza sativa
MSARASNHAYICSDDSQMPYYNNSVPSGGNGRFYITQNHQDAHYASSDDGSQKIGSSPQAFEAPYCTLESSSANGAHPAHSSASSHSISPISGSPLSHHDSHSDHTYNSPPSASCVTEITDLQIKLRELENAILGPELDIAYDSPESALQPNIMATPENWRQLLGINTGDLKQVIIACGKAVAENDVRLTELLISELGQMVSVSGDPLQRLGAYMLEGLVARLSSSGSKIYKSLKCKEPTSSELMSYMHLLYEICPFFKFGYMSANGAIAEAIKGENFVHIIDFQIAQGSQWMTLIQALAARPGGPPFLRITGIDDSNSAYARGGGLDIVGMRLYKVAQSFGLPFEFNAVPAASHEVYLEHLDIRVGEVIVVNFAYQLHHTPDESVSTENHRDRILRMVKSLSPRLVTLVEQESNTNTRPFFPRYLETLDYYTAMFESIDVALPRDDKRRMSAEQHCVARDIVNLIACEGAERVERHEVFGKWKARLTMAGFRPYPLSSVVNSTIKTLLHTYNSFYRLEERDGVLYLGWKNRVLVVSSAWC

SEQ ID NO: 343 - protein, 250 aa, Oryza sativa (japonica cultivar-group)
MGRGRVELKRIENKINRQVTFSKRRNGLLKKAYELSVLCDAEVALIIFSSRGKLYEFGSAGITKTLERYQHCCYNAQDSNNALSETQSWYHEMSKLKAKFEALQRTQRHLLGEDLGPLSVKELQQLEKQLECALSQARQRKTQLMMEQVEELRRKERQLGEINRQLKHKLEVEGSTSNYRAMQQASWAQGAVVENGAAYVQPPPHSAAMDSEPTLQIGYPHQFVPAEANTIQRSTAPAGAENNFMLGWVL

SEQ ID NO: 344 - protein, 324 aa, Glycine max
MHETHSIGGGRFYGGGDRRLRPHHQQQQPPPLKCPRCDSLNTKFCYYNNYNLSQPRHFCKNCRRYWTKGGVLRNVPVGGGCRKSKRSNKPKTTTTTTTSNTNNNRSSFSATAPATAPTPPAPELEHHSHSHSSSESSTLTVTATEEMSAPPPTTSNAPSKNSLLLDNDHREAKMFANPNPNPSLDSGGIFSEIGNFTSLINLNNNEAFGFGNNKNNNSILDATSFRFGISVTNQVQAAAGGGHGQWQQQNHQEFGTASFLDHTVPLEFSSLQHKTGHQGGFGSLDWQPGADQGLFDLPNTVDQPYWTHAHWSDQDNTSSLFHLP

SEQ ID NO: 345 - protein, 587 aa, Arabidopsis thaliana
MKRDHHQFQGRLSNHGTSSSSSSISKDKMMMVKKEEDGGGNMDDELLAVLGYKVRSSEMAEVALKLEQLETMMSNVQEDGLSHLATDTVHYNPSELYSWLDNMLSELNPPPLPASSNGLDPVLPSPEICGFPASDYDLKVIPGNAIYQFPAIDSSSSSNNQNKRLKSCSSPDSMVTSTSTGTQIGGVIGTTVTTTTTTTTAAGESTRSDILVDSQENGVRLVHALMACAEAIQQNNLTLAEALVKQIGCLAVSQAGAMRKVATYFAEALARRIYRLSPPQNQIDHCLSDTLQMHFYETCPYLKFAHFTANQAILEAFEGKKRVHVIDFSMNQGLQWPALMQALALREGGPPTFRLTGIGPPAPDNSDHLHEVGCKLAQLAEAIHVEFEYRGFVANSLADLDASMLELRPSDTEAVAVNSVFELHKLLGRPGGIEKVLGVVKQIKPVIFTVVEQESNHNGPVFLDRFTESLHYYSTLFDSLEGVPNSQDKVMSEVYLGKQICNLVACEGPDRVERHETLSQWGNRFGSSGLAPAHLGSNAFKQASMLLSVFNSGQGYRVEESNGCLMLGWHTRPLITTSAWKLSTAAY

SEQ ID NO: 346 - protein, 237 aa, Oryza sativa
MSLSLGFSAGAGVGADRLAAAPALQAAGALPPRVDVSLSLARAANGQPSSYLPLNENDSLDMVLFDVLREASAVAALSSSSSSSPELGARTTAPVVAGHPAGRKGGGGGGGGRGAAARGGAAGGRHYRGVRRRPWGKYAAEIRDPTRHGARLWLGTFGTAEEAAAAYDRAAFRMRGAKALLNFPPAVAGDGARRGAAAAAKQVGMSDVVPRACHVVCYSVLSAHIFYDIFRGVIPIP

SEQ ID NO: 347 - protein, 443 aa, Lemna paucicostata
MDVNSSGEDFVLKARKPYTITKQREKWTEEEHNKFLQALKLYGRSWQRIEEHIGSKTAVQIGSHAQKFFSKLEKEALIKGVPLGQGQGIEIPPPRPKRKPNNPYPLKTSISNGIGGLHQKKASSDEDLLGLSLFHDPSCKTKPSPDVELGRFEGLRIDTSLKKGDSKPKSISGTTSGTTTDQNAEKSMQLTASAFPPFFNMSAEFSSLVVSTLLQNPAAYATAMLAASFWPPADVDTSSDPGSDGRINPTPSIAAIAAATVAAASAWWAMHGLLPFCPPAGLFPGVFPLAPSLTVEEAGQRSKSIPSSSESDERNPANETNREPDEPRGEKKKADRSSCGSNTPSSSDMETNAVLDLEKEDLHLGPAHSPSWKEVSHQGRKAFQALFSREVLPQSFSPPKEEEGRSKPRRTGFKPYKRSSASPVHASSENDVKRLRLQNESFP

SEQ ID NO: 348 - protein, 278 aa, Musa acuminata
MAMSHLSMVEARLPPGFRFHPRDDELVCDYLERKVSGENGNGGMHGWPVIVDVDLNKCEPWELPEMACVGDKEWYFFNLRDRKYATGQRTNRATRSGYWKATGKDRRVARRGMLVGMRKTLVFYRGRAPKGRKTDWVMHEFRIEPSSNPPNFSFEEDWVLCRVSSKTRGVITKPDVKNYDDDTTSSSLPPLRNTYITFDQAPRSLEGFEQVPCFSNFTAQLAAAAPPVGSPDLSYYDNKFSTRPAFDHFPKLNPPNIIQENLESYFGENAVSHMRNPF

SEQ ID NO: 349 - protein, 484 aa, Physcomitrella patens
MNVSEGCSTLTGAQLKYSTDKSNMSYETVYRDAAVESPQREVSNESGSTLKEHDYFGLSEVLSSNSSSGKQPEKCCREELNLNESATTLQLGPPAAVKPSGQADGDDAHDEGAGPENPAKRSAYHMQQESLADGRKAAAEMGSFKIQRKNILEEFRAMKAHAHMTKSPKTVQTMQHNMHVSYSGAQMAFGGAKNNGVKRVFSEAVVANHNAASGVGVGVREGNDDVSRCEEMNGTEQLDLKVHLPKGMGMARMAPASGSPSFDNMQGPLNPFFRKSLVSKMPVPDGGDSSANASNDCANRKGMVASPSVQPPPAQNQTVGWPPVKNFNKMNTPAPPASTPARACPSVQRKGASTSSSGNLVKIYMDGVPFGRKVDLKTNDSYDKLYSMLEDMFQQYISGQYCGGRSSSSGESHWVASSRKLNFLEGSEYVLIYEDHEGDSMLVGDVPWELFVNAVKRLRIMKGSEQVNLAPKNADPTKVQVAVG

SEQ ID NO: 350 - protein, 215 aa, Arabidopsis thaliana
MASSQWTRSEDKMFEQALVLFPEGSPNRWERIADQLHKSAGEVREHYEVLVHDVFEIDSGRVDVPDYMDDSAAAAAGWDSAGQISFGSKHGESERKRGTPWTENEHKLFLIGLKRYGKGDWRSISRNVVVTRTPTQVASHAQKYFLRQNSVKKERKRSSIHDITTVDATLAMPGSNMDWTGQHGSPVQAPQQQQIMSEFGQQLNPGHFEDFGFRM

SEQ ID NO: 351 - protein, 503 aa, Physcomitrella patens
MKFSNEVVHKSMNITEDCSALTGALLKYSTDKSNMNFETLYRDAAVESPQHEVSNESGSTLKEHDYFGLSEVSSSNSSSGKQPEKCCREELNLNESATTLQLGPPAAVKPSGHADGADAHDEGAGPENPAKRPAHHMQQESLADGRKAAAEMGSFKIQRKNILEEFRAMKAQAHMTKSPKPVHTMQHNMHASFSGAQMAFGGAKNNGVKRVFSEAVGGNHIAASGVGVGVREGNDDVSRCEEMNGTEQLDLKVHLPKGMGMARMAPVSGGQNGSAWRNLSFDNMQGPLNPFFRKSLVSKMPVPDGGDSSANASNDCANRKGMVASPSVQPPPAQNQTVGWPPVKNFNKMNTPAPPASTPARACPSVQRKGASTSSSGNLVKIYMDGVPFGRKVDLKTNDSYDKLYSMLEDMFQQYISGQYCGGRSSSSGESHWVASSRKLNFLEGSEYVLIYEDHEGDSMLVGDVPWELFVNAVKRLRIMKGSEQVNLAPKNADPTKVQVAVG

SEQ ID NO: 352 - protein, 581 aa, Lemna gibba
METCSSGEELIVKPRKPYTITKQREKWTEEEHNRFLEALKLYGRAWQRIEEHIGTKTAVQIRSHAQKFFTKLEKEAVSKGVPLGQVHDIEIPPPRPKRKPTNPYPRKIGVGPSYPSGGERDDNRQLTHLPSSSLHSKGKAEDFFVDSSPEKQAGMNSEKITKEAPVALSLFHVAPSSPTPSSSKSTVPLPDDEKNPSINFDLNKKNRPCGVNADPNTVKFPSPSAISSVHQSTAAFPHPFSWPHVPPAFSSHLTSALLQNPAAHAAANMAASFWLTADVETSSSVDSGNAASSSSPSVAAAAIATVAAASAWWATHGLLPFCYPSFNGCFAAVPPPPTTTPTLTEATRVKVNPRNGKEEEEKDLRQGFDPGTSLTAKGSPLSSTDSNPSEKREVNGEGEVNVHGQPQNQQKSTPDEESFRRKGKNQLDRSSSGSNTPGSEVDNDGAGPTEEEKPKDDDLSVDPNRRGVDPRKEVSKEGRLAFQALFSRGVLPQSFSPTEGEAEKDEVLAPASAPSEVNALQPPQVNSVDQTSVDIGQLRPKPHCIGFKPYKRCSVEAKETEPPPEDDKCSKRMCLEREAST

SEQ ID NO: 353 - protein, 415 aa, Arabidopsis thaliana
SRRSFDFRLSSLHKGKAQGSSFREYSSSRDLLSPVIVQTSRWANLPPELLFDVIKRLEESESNWPARKHVVACASVCRSWRAMCQEIVLGPEICGKLTFPVSLKQPGPRDAMIQCFIKRDKSKLTFHLFLCLSPALLVENGKFLLSAKRTRRTTRTEYIISMDADNISRSSNSYLGKLRSNFLGTKFLVYDTQPPPNTSSSALITDRTSRSRFHSRRVSPKVPSGSYNIAQITYELNVLGTRGPRRMHCIMNSIPISSLEPGGSVPNQPEKLVPAPYSLDDSFRSNISFSKSSFDHRSLDFSSSRFSEMGISCDDNEEEASFRPLILKNKQPRWHEQLQCWCLNFRGRVTVASVKNFQLVAARQPQPQGTGAAAAPTSAPAHPEQDKVILQFGKVGKDMFTMDYRYPLSAFQAFA

SEQ ID NO: 354 - protein, 444 aa, Lemna gibba
MDAISSGEDFILKTRKPYTITKQREKWTEEEHRKFLEALKLYGRSWQRIEEHIGTKTAVQIRSHAQKFFSKLEKEAVIKGVPLGQAHGIEIPPPRPKRKPNIPYPRKISSDIDGSHQKVASDEDKCFMGLALFQDSPCTTKPSSDVDLGRFEGLSIDSCVRKGDAKSTSHGGSMSGVTRDQHKAKSMPFAASDFSAFFNLSAQFSNLVISTLLQNPAAHAAATLAASFWPAAGMKTSTGTTPDNQTNPTPSMEAIVAATVAAASAWWAAHGLLPLCPLAGLFPGISAFSPGPKVEEAANPRSKSMPSSSDSDELNPTKQVSCSKPDESGREKKKADRSSCGSNTPSSSDVETDVVLDLEKEDLHLGLAYSASWKEVSHQGREAFQALFNREVLPQSFSPPKEEEGRAKPRRTGFKPYKRCSATPTHASGENDRKRIRLQNEPSL

SEQ ID NO: 355 - protein, 415 aa, Arabidopsis thaliana
SRRSFDFRLSSLHKGKAQGSSFREYSSSRDLLSPVIVQTSRWANLPPELLFDVIKRLEESESNWPARKHVVACASVCRSWRAMCQEIVLGPEICGKITFPVSLKQPGPRDAMIQCFIKRDKSKLTFHLFLCLSPALLVENGKFLLSAKRTRRTTRTEYIISMDADNISRSSNSYLGKLRSNFLGTKFLVYDTQPPPNTSSSALITDRTSRSRFHSRRVSPKVPSGSYNIAQITYELNVLGTRGPRRMHCIMNSIPISSLEPGGSVPNQPEKLVPAPYSLDDSFRSNISFSKSSFDHRSLDFSSSRFSEMGISCDDNEEEASFRPLILKNKQPRWHEQLQCWCLNFRGRVTVASVKNFQLVAARQPQPQGTGAAAAPTSAPAHPEQDKVILQFGKVGKDMFTMDYRYPLSAFQAFA

SEQ ID NO: 356 - protein, 344 aa, Cicer arietinum
GFREFKDDSDFDEDEEDDDDDEGLLVGGKGFTFSSNNTKSFKTFSRGSTAAKSVSPKSNEQAEKACKRKRKNQYRGIRQRPWGKWAAEIRDPRKGVRVWLGTFNTAEEAARAYDAEARRIRGKKAKVNFPEEAPVTSSKRFKPNLENKLVNKNLNSFNPNGNKMFNFGENVENYYSPMDQVEQKPLVNNNNQYANMGPFSGNGVQHSQISPSADVTAYFSSEHSSNSFDYSDLGWGEQGPKTPEISSMLSAAAPLESESQYVQNNMQSNNNQNMLPVEDNSAKTLSEELADIESQLKFFETPYDDNWGDASLASFLGGDATQDGGNPMNLWSFDDLPSISGGVF

SEQ ID NO: 357 - protein, 415 aa, Arabidopsis thaliana
SRRSFDFRLSSLHKGKAQGSSFREYSSSRDLLSPVIVQTSRWANLPPELLFDVIKRLEESESNWPARKHVVACASVCRSWRAMCQEIVLGPEICGKLTFPVSLKQPGPRDAMIQCFIKRDKSKLTFHLFLCLSPALLVENGKFLLSAKRTRRTTRTEYIISMDADNISRSSNSYLGKLRSNFLGTKFLVYDTQPPPNTSSSALITDRTSRSRFHSRRVSPKVPSGSFNIAQITYELNVLGTRGPRRMHCIMNSIPISSLEPGGSVPNQPEKLVPAPYSLDDSFRSNISFSKSSFDHRSLDFSSSRFSEMGISCDDNEEEASFRPLILKNKQPRWHEQLQCWCLNFRGRVTVASVKNFQLVAARQPQPQGTGAAAAPTSAPAHPEQDKVILQFGKVGKDMFTMDYRYPLSAFQAFA

SEQ ID NO: 358 - protein, 272 aa, Triticum aestivum
MLLLNPASEAAALDSIRQQLLEEPARPAYCRSASFGSLVADQWSESLPFRPNDADDMVVYGALRDAFSCGWLPDGSFAAVKPEPLPSPDGSYDGSCLGSFLAPPAPGPDAPWAEEEAEVAAAASRGKHFRGVRQRPWGKFAAEIRDPAKNGARVWLGTFDSAEDAAVAYDRAAYRMRGSRALLNFPLRIGSEIAAAAAAAGQKRPSPQPASPDSSSPSCSAPGSSKRRKRGEAAAASMAMALVPPPPAQAPVQLTLPAQPWLAAGAVQQLVS

SEQ ID NO: 359 - protein, 452 aa, Synechocystis sp. PCC 6803
MENTDEKKGNILLVDDLPNNLQLLSDLLINLGYTVRSVTSGKMALRTLQVKRPDLILLDIKMPDMDGYQVCEMIKKEEELQDIPIIFISALGDTFDKVKAFECGGVDYITKPFQIEEVVARIEGQFTIQRQRIALKREVRKRREAEEVLYQSRALLSSVLNSALDGIAAMQAVRNPQTGDIEDFRCLVINPILSKAFNRSREDLIGRVLLKRFLQRLDPQLFDQFVNLVETGTFLTQDIYFPIANSDWYHFVAVKLGDGFAVTVRDITDRKRMELELQAANQQLQLLANIDGLTHIANRRRFDEYLAQEWQRHCREQKPLSLILVDIDYFKAYNDLYGHQKGDDCLQKVANTLVDIAKRITDLVARYGGEEFVIVLPNTNRQDALAMAENMLQAIAALAIPHEGSSVSKYVTISIGVSSIIPMPEDTIERIISEADQALYSAKSQGRNRAIA

SEQ ID NO: 360 - protein, 314 aa, Medicago truncatula
MDFGGNMFCLNNRDQSNTNNNGNSNGFTWCSSGSTTTGTAWNMNTFNVNEVNNSVSAANRTEAGLANALMYLPQNEGGGRQYQSAYGGGVSRGHMMPDPHLTCLKLGKRHYFEDVSGGGGVMGEKKGKGGYCGGGKTAAVGGYTAVTRCQVDGCNVALMNAKEYHRRHKVCEMHSKAPKVVVLGLEQRFCQQCSRFHVVSEFDDSKRSCRRRLAGHNERRRKSSHDSVGRNSSQGGCALSLLSSRTDSWLSPADLSVRCSAALSELIAENRASIMARQYVSDRDWHLQHHAVEDYKEIQSESNYFPQHMFPQTH

SEQ ID NO: 361 - protein, 826 aa, Arabidopsis thaliana
MDGREAMAFPGSHSQYYLQRGAFTNLAPSQVASGLHAPPPHTGLRPMSNPNIHHPQANNPGPPFSDFGHTIHMGVVSSASDADVQPPPPPPPPEEPMVKRKRGRPRKYGEPMVSNKSRDSSPMSDPNEPKRARGRPPGTGRKQRLANLGEWMNTSAGLAFAPHVISIGAGEDIAAKVLSFSQQRPRALCIMSGTGTISSVTLCKPGSTDRHLTYEGPFEIISFGGSYLVNEEGGSRSRTGGLSVSLSRPDGSIIAGGVDMLIAANLVQVVACSFVYGARAKTHNNNNKTIRQEKEPNEEDNNSEMETTPGSAAEPAASAAENNPTLITGYIKAAIVVLFTLWVIRVYDFWVGFKCMDGREAMAFPGSHSQFYLQRGVFTNLTPSQVASGLHAPPPPPGMRPMSNPNIHHPQASNPGPPFSMAEHRHSDFGHSIHMGMASPAAVQPTLQLPPPPSEQPMVKKKRGRPRKYVPDGQVSLGLSPMPCVSKKSKDSSSMSDPNAPKRARGRPPGTGRKQRLANLGEISSEWMNTSAGLAFAPHVISVGSGEDIVSKVLSFSQKRPRALCIMSGTGTVSSVTLREPASTTPSLTFEGRFEILSLGGSYLVNEEGGSKSRTGGLSVSLSGPEGHVIGGGIGMLIAASLVQVVACSFVYGASAKSNNNNNKTIKQEIKPKQEPTNSEMETTPGSAPEAAASTGQHTPQNFPAQGMSGWPVSGSGSGRSLDSSRNPLTDIDLTRGSSSIHYVSAVHIFVVVDFSLGMLKPDISGLRPELSVPYCNILNVTEPPHFQATQRDCNSFISLIKASFGFFNICVQFGFGFECLVLEMK

SEQ ID NO: 362 - protein, 447 aa, Zea mays
MASEAAAASVISRNPCLFAPPLITNQQQPSHQEPQQEMPLPPPAKKKRNLPGTPGKLLASSSCIDPAAEVIALSPRTLLATNRFVCEICGKGFQRDQNLQLHRRGHNLPWKLRQRSAGKEPRKRVYVCPEKTCVHHNPCRALGDLTGIKKHFCRKHGEKKWKCDKCNKRYAVQSDWKAHAKTCGTREYRCDCGTLFSRRDSFITHRAFCDALAEETARQLNAAAAATSHLNNNAHVVVGLSLPSMVGHINGATGSILLPGAPPQLYADLFAPAPPQLSWPCELTSAAAAASSSAAASGKQKTDSVPSVFSGYPHANLAVPGAGAADMSATALLQKAAQMGAVTSGSGSVIMTTTAGGHHQPSDCGAGLLFSALTQQNATNLISGSGTSTLTTSQLTATGGNMPYDVLSAVRHAGLKDAAVAVGREETRDFLGVGVQALCSSSLNGWI

SEQ ID NO: 363 - protein, 78 aa, Gossypium barbadense
RIMKKALPANAKIAKDAKETVQECVSEFISFITSEASDKCQKEKRKTINGDDLLWAMATLGFEDYIDPLKIYLTKYRE

SEQ ID NO: 364 - protein, 184 aa, Arabidopsis thaliana
MQGTSKDNGGRHPLYRGVRQRKNSNKWVSEIREPRKPNRIWLGTFSTPEMAAIAYDVAALALKGSQAELNFPNSVSSLPAPTSMSPADIQAAAASAAAAFGAARDAIVMANNNSQTSGVACMNSSYDNTNMNGFMDEDLVFDMPNVLMNMAEGMLLSPPRPTVFDAAYDADGFPGGDDYLWNFP

SEQ ID NO: 365 - protein, 271 aa, Glycine max
MDDGELDFSNHEVFSSPNMGELPSSGSMDSFFDELLKDTHACTHTHTCNPPGPDFSHTHTCYHVHTKIVPAPEEDHVATDDTAESAEKKSSSSKKRSLGNKEAVRKYREKKKARAASLEDEVVKLRALNQHLMKKLKGQAALEAEIARLKCLLVDIRGRIEGEIGSFPYQKPTPNANPPVANLPGSYVMNPCNLQCDDRVYCHHPYGKIGESAALNGEEFDGCEFENLQCLASQNLGLKDLRACGVGQARSNVNSSASNKRKGGSHAVTAG

SEQ ID NO: 366 - protein, 282 aa, Solanum demissum
MVGKISSDLPPGFRFHPTDEELIMYYLRYQATSRPCPVSIIPEIDVYKFDPWELPEKAEFGENEWYFFTPRDRKYPNGVRPNRAAVSGYWKATGTDKAIYSANKYVGIKKALVFYKGKPPKGVKTDWIMHEYRLSDSKSQTYSKQSGSMRLDDWVLCRIYKKKNLGKTIEMMKVEEEELEAQNVSINNAIEVGGGPQTMKLPRICSLSHLLELDYYGSIPQLLSDNLLYDDQSYTMNYVSNTSNVDQVSSQQQNTNNITSNNCNIFFNYQQPLFVNPTFQSQ

SEQ ID NO: 367 - protein, 570 aa, Medicago truncatula
MDNGCFSSPRRDFPAGLRVLVVDDDPTWLKILEKMLKKCNYEVTTCCLARHALSLLRERKDGYDIVISDVNMPDMDGFKLLEHVGLEMDLPVIMMSVDGETSRVMKGVQHGACDYLLKPIRMKELRNIWQHVFRKRIHEVREFENFESFESMHLMRNGSEMSEEGNLFALEDMTSTKKRKDVDSRHDDKEFLDSSSSKKARVVWSVDLHQKFVKAVNQIGFDKVGPKKILDLMNVPWLSRENVASHLQKYRLYLSRLQKDNEQKSSSSGMKHSDLPSKDVGNFGFPNSANKQQNDASIDKYNYSEGSLQHQNIETKSHEGNPKGIVPHSTAAEKARALTGNITDATDTALNKPFAPLESERKRGAFDCNMSTPYSWTEIPKTQLKKEQKSVVHLEDKFNLLPLNGKQHNIQVDQSQSIASISSTPSITEQDVAACVETKPTFSDYKKDYTSSVSSIRSSVDTFPFQPGSLMMNDQPTQPISTTNFGLKTQTSNLSCISDLESYQRNLLLGGEAASAPLDEDLYFYWHNMNFGQQNIGMSEYYDPGLLIEVPNHLYDSADYSVIDQGLFIA

SEQ ID NO: 368 - protein, 419 aa, Arabidopsis thaliana
MAFHNNHFNHFTDQQQHQPPPPPQQQQQQHFQESAPPNWLLRSDNNFLNLHTAASAAATSSDSPSSAAANQWLSRSSSFLQRGNTANNNNNETSGDVIEDVPGGEESMIGEKKEAERWQNARHKAEILSHPLYEQLLSAHVACLRIATPVDQLPRIDAQLAQSQNVVAKYSTLEAAQGLLAGDDKELDHFMTHYVLLLCSFKEQLQQHVRVHAMEAVMACWEIEQSLQSFTGVSPGEGTGATMSEDEDEQVESDAHLFDGSLDGLGFGPLVPTESERSLMERVRQELKHELKQGYKEKIVDIREEILRKRRAGKLPGDTTSVLKSWWQSHSKWPYPTEEDKARLVQETGLQLKQINNWFINQRKRNWHSNPSSSTVSKNKRRRYMESLNLEGFLYEAMQVKTAEETVEIKLACRDPKAL

SEQ ID NO: 369 - protein, 723 aa, Phaseolus vulgaris
MDAYSSGEEVVVKTRKPYTITKQRERWTEEEHNRFLEALKLHGRAWQRIEEHIGTKTAVQIRSHAQKFFTKLEKEALVKGVPIGQALDIDIPPPRPKRKPSNPYPRKTTIGTATLHSGAKDGNLVESSHNNQALDLEKEPLPEKYDLDEGLTTVKENKDENCSKVFKVIQEVPCSSISSANRSSISMSVPLGNSCVLKEITSSVKEVITRDENTESFLTVELGNRNLEINDGKQANGTSKNSTLENSDALQTKLVQNEKTDGLDSALTIDGMQGNQNYPRHVTVHVVDGKLGTSTQNPSQDMLFRDSMFQPIGGDNGQPNLFTNSAPTNTSESQNNTARSSVHQSFLPYPPFTQHNQDDYQSFLHMSSTFSNLVVSTLLQNPAAHVAASFAATFWPYANPETSADSPRCSQGGFTSRQIGSPPSVAAIAAATVAAATAWWAAHGLLPLCLPLHAAFACPPASVTAVPSMNPPVQDQKHPEYSEAPQAQHSDSKSLAVISSDSETGNAKLNTSPKATDHVTNETISEHLDSDKTKGRKQVDRSSCGSNTASSSDVETDALGKDEKGKEEPETPDANNLAIEFSNRRRSIYNLTDSWKEVSSEGRLAFQALFSREVLPQSFSPPHALKNKDQMDITNDYKQNIADRNEDLDSKKCSSNALHKIPSFVENNVGLLTIGLGQGKLKTRRTGFKPYKRCSVEARENRVGANCEEKGCKRIRLEGDTST

SEQ ID NO: 370 - protein, 285 aa, Hordeum vulgare
APEYYFPTLVSSAEENMASFAATQLGLNLGYRTYFPPRGGYTYGHHPPRCQAEGCKADLSGAKRYHRRHKVCEHHSKAPVVVTAGGLHQRFCQQCSRFHLLDEFDDAKKSCRKRLADHNRRRRKSKPSDADAADKRRTQASKAAASTKGKAAGSSSKSTGTGDGMDIQVQLGSGDLSKDQDETMGQGEVVKEMQVDPKGKASMQLQQQQQQGHHVHGLHLQSQHGFPFPSTSAGSCFPQSQAVSSTDNTSNIGQVQQEQLGSLGFHQHSNILQLGQAMFDLDFDH

SEQ ID NO: 371 - protein, 163 aa, Glycine max
GEGTGATMSDNEEDQAESNANLYEGGMDGADSLSFGPLVPTETERSLMERVRQELKHELKQGYKDKIVDIREEILRKRRAGKLPGDTTSLLKAWWQSHSKWPYPPEEDKARLVQETGLQLKQINNWFINQRKRNWHTNPSSSSGSKSKRKSSGAGESSNQSFM

SEQ ID NO: 372 - protein, 841 aa, Oryza sativa
MAAAATAAASPVEGLTGGGGGGGGGVDGLFVELWRACAGPLVTVPAVGERVFYLPQGHIEQVEASTNQVAEQQGAPLYNLPWKIPCKVMNVELKAEPDTDEVYAQLTLLPEKQQDGNGSGNGNVSKDKVEEEEVVPPAATERPRVHSFCKTLTASDTSTHGGFSVLRRHADECLPPLDMSQHPPTQELVAKDLHGVEWRFRHIFRGQPRRHLLQSGWSVFVSAKRLVAGDAFIFLRGENGELRVGVRRAMRQQANIPSSVISSHSMHLGVLATAWHAVNTGTMFTVYYKPRTSPSEFVVPRDLYKESLKRNHSIGMRFKMTFEGEEAAEQRFTGTIVGVGDSDPSGWADSKWRSLKVRWDEAASVPRPDRVSPWQIEPANSPSPVNPLPAPRTKRARPNVLASSPDLSAVNKEVASKVMANSQQNGLPRAFHSQENMNLRSRFGDSNELNTSQKLTMWSSGSNQEKNNVSVQRELGSQSWMQMRRPDGSSEILSGFQPLKDTRNPLSSFPSQISGNRSNTWNTINVHYPDQNANHNMYPGTWSLMPPNTGFGVNQQNYLMTPDITLPQRSLNAKFGGNGAFTSLRAHGIDQRSSGWLGHIEPSSHIDDASSSLIKPQPLVIDHNVQKAKGSSCMLFGISLDSPAKPELLISPPSVAFDGKLQQDALEEDECSDPSKTVKPLDGAQHDSAREKHQSCPDGTKNIQSKQQNGSSRSCKKVHKQGIALGRSIDLTKFTCYDELIAELDQMFDFNGELNSSSKNWMVVYTDNEGDMMLVGDDPWNEFCNMVHKIFIYTREEVQKMNPGALNSRSEDSRSTSVERGLVGEGLQGGLSTPSLNSENC

SEQ ID NO: 373 - protein, 360 aa, Medicago truncatula
MNTLSLHFYTPHSFLSLKPKPQPRIQCCSTNNNIIDDIDMVKTKQGTYEQKQNKVCVLWDLDNKPPRGPPYNAAVSLKNLAERFGDVTDISAYANRHAFIHLPQWVLNQRRERKNLDILERKGIINPPEPYVCSVCGRKCKTNVDLKKHFKQLHQRERQKKLNRLNSLKGKKRQKYKERFVSGDDKYNDAVREILKPKVGYGLASELRRAGVFVKTVEDKPQAADWALKKQMMHSMSRGIDWLFLVSDDSDFSEMLRKAREANLGTVVVGDVDRALGRHADLWVPWNAVENGEVMDMDLIPRNRDRRRTNSTSTTMDDFGDVLFFHEGEEMEDDFMLEYSDDDDFDEDSDEEDEDGFYIY

SEQ ID NO: 374 - protein, 247 aa, Glycine max
NSTSHLPTPSSSTTCWMWNPRDHEDQDESWEVRAFAEDTSNMMGTTWPPRFYYCSFCRREFRSAQALGGHMNVHRRDRARLHQASVVPHNNNNSNNSNINPISSFSNTPSFLNISHHHQDPFVANGGLCLLYPFPSPNNNNNDPFSSLAHNNNACGDLPSTVFSVSSSHSQYSSLQYSPIRVPSCSATSFDFSVAQPAAASGRNNAFSSSYSGKVEQEPIISSSTHHGLHHEELDLELRLGNKSTST

SEQ ID NO: 375 - protein, 281 aa, Triticum aestivum
MQEPGRRPFAGAVDLRRPKGYPAPSATAQAEVGAAAAEEGEAHGDPCPRCESRDTKFCYYNNYNTSQPRHYCKSCRRYWTKGGTLRNVPVGGGSRKSSSSSSSSSSSPKRAKNSKRRRVAPAAPPAPEAEPGADASAAVAATTKEAAATEDVTAAEDPAAAPTADGCFAFTAGEPDAPPAKEGCFTLTAGEPDAPPAADGDGGFAFTAGEPDVPPAADRNGGLAFTDHPSVALGLGVADDAGGKELADPSPFEWPSGCDLGSYWVAGVFADTDPALFLSPP

SEQ ID NO: 376 - protein, 413 aa, Arabidopsis lyrata
SRRSFDFRLSSLHKGKAQGSSFREYSSSRDLLSPVIVQTSRWANLPPELLFDVIKRLEESESNWPARKHVVACASVCRSWRAMCQEIVLGPEICGKLTFPVSLKQPGPRDAMIQCFIKRDKSKLTFHLFLCLSPALLVENGKFLLSAKRTRRTTRTEYIISMDADNISRSSNSYLGKLRSNFLGTKFLVYDTQPPPNTSSSALITDRTSRSRFHSRRVSPKVPSGSYNIAQITYELNVLGTRGPRRMHCIMNSIPTSSLEPGGSVPNQPEKLVPAPYSLDDSFRSNISFSKSSFDHRSLDFSSSRFSEMGISCNDNEEETSFRPLILKNKQPRWHEQLQCWCLNFRGRVTVASVKNFQLVAARPSQPQGTGTAPATAPAHPEQDKVILQFGKVGKDMFTMDYRYPLSAFQAFA

SEQ ID NO: 377 - protein, 307 aa, Gossypium hirsutum
MGRQPCCDKVGVKKGPWTPEEDLILVSYIQQHGPGNWRAVPTKTGLLRCSKSCRLRWANYLRPGIRRGNFTENEEKMIIHLQALLGNRWAAIASYLPERTDNDIKNYWNTHLKRKLKKLQGNESSSRYGFPSSSSSYQICRGQWERKLQTDIHMAKKDLSDALSPEKSSDLVEMKPFNDHTSYPKPSGYASSTENIAKLLKGWMRNNPWKMADSADYSEEGTVPMKEDKNSKEMAEAFQSHLGFESLDSSLSDISPSMSPETSLSQYESKPHLNAQSQLSLLEKWLFDEGKDYQLCDITLDQNLHFF

SEQ ID NO: 378 - protein, 449 aa, Geobacter metallireducens GS-15
MQGKAHGKVLIVDDEPNALKVLAAILREEGYSVFKAGDAAEAEQALSKEDIDTVITDMKMPGKDGIQLMDFMAEHYPDIPIIFLTAYGSVDSAVHAITRGAFYYFIKPPDYVKLKGILARAVEQRSLKRELETLRKRVSGGTPARIVGATPEMLRIFETVEAVKDSMSSVLICGETGTGKELIARSLHYGSVRRDKPFVAVNCAAMPRELIESELFGYEKGAFSGAFSRRIGRFEEAAEGTIFLDEIGELEMPLQAKLLRVLQEKEIERLGSNKKIKVNFRLISSTNRNIPSEITAGNFREDLFYRLNVVQVQVPPLRDRREDIPLLAAELVREYGAREGKVLRFDDEVMQVFLNYDWPGNIRQLGNIIERAVVLAKKDRITTKELPEELKPYVVRVESRQQVRTLRELEEAAILAALEESGGNKSHAAKMLGISRKALYKRLGEMEVF

SEQ ID NO: 379 - protein, 187 aa, Arabidopsis thaliana
RDRDSGGGQNGNNQNGQSSLSPREQDRFLPIANVSRIMKKALPANAKISKDAKETMQECVSEFISFVTGEASDKCQKEKRKTINGDDLLWAMTTLGFEDYVEPLKVYLQRFREIEGERTGLGRPQTGGEVGEHQRDAVGDGGGFYGGGGGMQYHQHHQFLHQQNHMYGATGGGSDSGGGAASGRTRT

SEQ ID NO: 380 - protein, 583 aa, Glycine max
MDNGCFSSSPRHDAFPAGLRVLVVDDDLTWLRILEKMLKKCLYEVTTCCLATEALKKLRERKEAYDIVISDVNMPDMDGFKLLEQVGLEMDLPVIMMSVDGETSRVMKGVQHGACDYLLKPIRMKELRNIWQHVFRKRMHEARDFESHEGFDFEGIHLMRNGSDHSDDGNLFAVEETTSIKKRKDADNKHDDKEFGDHFPTKKARVVWSVDLHQKFVKAVNQIGFDKVGPKKILDLMNVPWLTRENVASHLQKYRLYLSRLQKENDQKSSSSGIKHSDSPSKDLGSFSFLNTANKQQNDIATDSFSYSDGTLLIQMDATSYEGDLKGIVSEPTTEKRRASTSEIPDPKVQKSSQKSLNKPFTSVESSEANHAVFDCTIPTEYSWSEFPKGPLKEEQKTPVQLEDSLCQLPLHGTQHHIQIDQSQSIASINSNPSITEEEVAAKLETKPLYAGYESDYVNPVSSIGSAVEAFRSQSKSLMVSDQSSEPTFTSNLSLKTQGFNLDCISDLDFYQRNLLLGGEVASAPLDEDLNFFLLQSECYNMNFGLQNIDMSEYYDPRLTAEVPSHFYDSADYSSVDQSLFIA

SEQ ID NO: 381 - protein, 247 aa, Ipomoea nil
MGRGRVQLKRIENKINRQVTFSKRRTGLLKKAHEISVLCDAEVALIVFSTKGKLFEYATESCMEKILERYERYSYAERQLNSTDQNSQGSWTLEHAKLKARMEVLQRNQRHYEGEDLDSLSLKELQNLERNLIQHSNIRSKRNQLMYESILCSEKDKHCRTKYQLSKKIKEREKEMATQQQQQQEVQWEQPNDDINSSYVVPPPLVHLSSEGEYQGEGEYGETEGTQRQQQNNTSAMPQWMLSHLQG

SEQ ID NO: 382 - protein, 147 aa, Solanum demissum
MGRFDKEGLKKGPWTPEEDQKLLSFIDKHGCGSWRALPAKAGLQRCGKSCRLRWINYLRPDIKRGKFSLQEERTIIQLHALLGNRWSAIAAYLPSRTDNEIKNYWNSCLKKRLTKMGIDPMTHNQMVKAHQNMLQILVIWLNGKVQD

SEQ ID NO: 383 - protein, 242 aa, Hyacinthus orientalis
MGRGRVELKRIENKINRQVTFSKRRNGLLKKAYELSVLCDAEVALIVFSSRGKLYEFGSAGTGKTLERYQRCCYTSQDASIADREAQSWYQEVSKLKAKFESLQRSQRHLLGEDLGPLSVKELQQLERQMESALSQARQRKQTQIMLDQMEELRKKERHLGEINKHLKSRLEAEGATFRAIQGSWESTAAIQGNAFSVHPSQSRAMDCEPTLQIGYHHLVQPEEAIPRNTVGENNFMLGWVL

SEQ ID NO: 384 - protein, 254 aa, Triticum aestivum
LSRTSLYKKAGWYRSGIPGISSTHASVLYGRRRHRLLLLQTDKASMLDDAIEYLKHLQLQVQMLSMRNGMYRPSVNLPGAPDQLPTSQMCAALNRVDASSNHPSSMLPMNHFLGAMSGTRHLYGPPNQDRPRHEPLVLSSVPCTTTREPPFLLGPSQGSPLRSLQLTLPAEMIFQEEAMRKHRLSSTQETTSVPGHEMKQETPAARAGHFDACSIWKNQSQDMTPNNPESVLFAPHLRRFGNGNADSGLRAESK

SEQ ID NO: 385 - protein, 229 aa, Arabidopsis thaliana
MAESQAKSPGGCGSHESGGDQSPRSLHVREQDRFLPIANISRIMKRGLPLNGKIAKDAKETMQECVSEFISFVTSEASDKCQREKRKTINGDDLLWAMATLGFEDYIDPLKVYLMRYREMEGDTKGSGKGGESSAKRDGQPSQVSQFSQVPQQGSFSQGPYGNSQSLRFGNSIEHLEVLMSSTRTLFITIFRDSTMPVVSENLSDPLSIDMDCEAIYHHFIGLLILSCK

SEQ ID NO: 386 - protein, 375 aa, Fagus sylvatica
MCGGAIISDFIAPTGSRRLTADYLWGDRKKPISGKRFSKPVVDLDDEFELDFQGFKDEEESDIDEEEVLVQDVKPFTFSAPPSSGSKPVKSVEFNGQAEKSAKRKRKNQYRGIRQRPWGKWAAEIRDPRKGVRVWLGTFNTAEEAARAYDAEARRIRGKKSKGNFPMRLPVPKRSVKANLQKPLAKANLNSVQPNLNQNFNFMNSDQDYTMGLMEEKPFTNQYGYMDSIPVNADVGLKSFASNNTAPYFNSDQGSNSFDCSDYGWGEQGSKTPEISSVLSATLEGDESQFVEDAVPTKKLKSDSGNAVFIENNTAKTLSEELSAFESQMNFQMPFLEGSWESNMEALFSGDTTQDGNSMDLWSFDDLPVMAGGVL

SEQ ID NO: 387 - protein, 240 aa, Atriplex hortensis
MSYSYPPPLPSNTLNNFLSPKPVTMKTTGGPPKPTKLYRGVRQRHWGKWVAEIRLPKNRTRLWLGTFDTAEEAALAYDKAAYKLRGDFARLNFPNLRHEGSHIGGEFGEYKPLHSSVNAKLEAICESLAKQGNEKQGKSGKSKKKDVANNNNNTSSSSSSSCCTTATAAADAPQQQQRMPENGGDVKTESTSDSEVGSGGSSPLSDLTFGDNEEMGSENFLLESCPSHEIDWDAILSSES

SEQ ID NO: 388 - protein, 609 aa, Vigna radiata
MMMFEDIGFCGDLDLLSCPLGDEDVVAVRHTDPDPVVEDDYSDEEIDVDELEKRMWRDKVRHKRLKEQQKAKEGTDAVKQRQSQEQARRKKMSRAQDGILKYMLKMMEVCKAQGFVYGIIPEKGKPVTGASDNLREWWKDKVRFDRNGPAAIAKYQADNAIPGKNDGCNSIGPTPHTLQELQDTTLGSLLSALMQHCDPPQRRFPLEKGVPPPWWPTGNEVWWPQIGLPKDQGPPPYKKPHDLKKAWKVGVLTAVIKHMSPDIAKIRKLVRQSKCLQDKMTAKESATWLAIINQEEALARELYPDYCPPFSSGAGNGSMVINDCSEYDVDGAEEEPNFDVEDRKPDPLHPSNLGMERITGRLPLQISHPFKGDVVTNLDFIRKRKIPGDFNLMMDPKIYTCEHPQCPYNEPRLGFPDRSARDNHQLNCPYRNSSSDYGGGSNFHDSEVKPVIFPQSFVQPNTTSQAANVVQPSFAVSGLGVPEDGQKMINDLMTIYDTNIIGNNNLSSNNFVAAENQNFSQTMLQQQQQDSRRDNYFTGQGMMTEGNFFAREEGQFERFKAMNMNAPFDTNHMLFSPQCDLSSFDFKDIQGGGMDTGHRQQQEVSIWFE

SEQ ID NO: 389 - protein, 281 aa, Solanum demissum
MVGKISSDLPPGFRFHPTDEELIMYYLRYQATSRPCPVSIIPEIDVYKFDPWELPEKAEFGENEWYFFTPRDRKYPNGVRPNRAAVSGYWKATGTDKAIYSANKYVGIKKALVFYKGKPPKGVKTDWIMHEYRLSDSKSQTYSKQSGSMRLDDWVLCRIYKKKNLGKTIEMMKVEEEELEAQNVSINNAIEVGGPQTMKLPRICSLSHLLELDYFGSIPQLLSDNLLYDDQSYTMNNVSNTSNVDQVSSQQQNTNNITSNNCNIFFNYQQPLFVNPTFQSQ

SEQ ID NO: 390 - protein, 521 aa, Arabidopsis thaliana
MEKSGFSPVGLRVLVVDDDPTWLKILEKMLKKCSYEVTTCGLAREALRLLRERKDGYDIVISDVNMPDMDGFKLLEHVGLELDLPVIMMSVDGETSRVMKGVQHGACDYLLKPIRMKELKIIWQHVLRKKLQEVRDIEGCGYEGGADWITRYDEAHFLGGGEDVSFGKKRKDFDFEKKLLQDESDPSSSSSKKARVVWSFELHHKFVNAVNQIGCDHKAGPKKILDLMNVPWLTRENVASHLQKYRLYLSRLEKGKELKCYSGGVKNADSSPKDVEVNSGYQSPGRSSYVFSGGNSLIQKATEIDPKPLASASLSDLNTDVIMPPKTKKTRIGFDPPISSSAFDSLLPWNDVPEVLESKPVLYENSFLQQQPLPSQSSYVANSAPSLMEEEMKPPYETPAGGSSVNADEFLMPQDKIPTVTLQDLDPSAMKLQEFNTEAILRSLNWELPESHHSVSLDTDLDLTWLQGERFLANTGLQFQDYSSSPSLLSELPAHLNWYGNERLPDPDEYSFMVDQGLFIS

SEQ ID NO: 391 - protein, 163 aa, Solanum demissum
MVGKISSDLPPGFRFHPTDEELIMYYLRYQATSRPCPVSIIPEIDVYKFDPWELPEKAEFGENEWYFFTPRDRKYPNGVRPNRAAVSGYWKATGTDKAIYSANKYVGIKKALVFYKGKPPKGVKTDWIMHEYRLSDSKSQTYSKQSGSMRVRTSLICRLIASN

SEQ ID NO: 392 - protein, 268 aa, Brassica napus
  misc_feature (213)..(213): Xaa can be any naturally occurring amino acid
IPGVDPRRPNKDVIRKKVYVCPEPNCVHHHPSRALGDLTGIKKHFFRKHGEKKWKCDKCSKKYAVQSDWKAHAKTCGTKEYKCDCGTLFSRRDSFITHRAFCDALAEESARAIPNPILIQSSSPHQTQHNINFSSSSQNITSHNNNPHGHDELPMKQEEPHHHFHNIPPWLISSNPNPNGNNANYFPLASSSANFHHPSPAMSATALLQKAAXMGPSKSTTTPEEDEKSSYNKLITTTMAASMMTSPSEPGFGFQDYYMMNHHAHHHD

SEQ ID NO: 393 - protein, 317 aa, Brassica napus
  misc_feature (216)..(216): Xaa can be any naturally occurring amino acid
MTRRCSHCNQNGHNSRTCPNRGVKLFGVRLTEGSIRKSASMGNLSHHSGSGLSGLVSNNPGSPGDGPDHDGYASEDFVPGSSSSRERKKGNPWREEEHRMFLLGLQKLGKGDWRGISRNYVKTRTPTQVASHAQKYFIRQSNVSRRKRRSSLFDIIPDEATDSVPAAPLILETEECESMKSTNSVGVEAPEDSIQTQLQPPPPGSFPVLYPAYFSXPFYSFPFPVWPAAPVYVTEQVKEETHEILRPTAVHSKAAPINVDQLLGMSKLSLKESSLNGVSEQSLSLKLIGGSVSRQSAFHPNPASGGGSDMNTVIHAV

SEQ ID NO: 394 - protein, 264 aa, Solanum tuberosum
MCGGAIISDYEPAGNFYRKLSARDLWAELDPISDYWSSSSSSSTVENPYSAQSPVTHSVDKPKKSDSGKSNQLKKGNKTVKVEKEKSTGPRQRKNKYRGIRQRPWGKWAAEIRDPQKGVRVWLGTFNTAEDAARAYDEAAKRIRGNKAKLNFPAPSPPAKRQCTSTVAADPPPALLLESSNIISYNNSPLMNFGYDVQSQTPYYPMEMPVASDDYELKEQISNLESFLELEPADSSDQFSGIVDPDPLNVFLMEDFASTQHQFY

SEQ ID NO: 395 - protein, 603 aa, Oryza sativa (japonica cultivar-group)
MEINSSGEEAVVKVRKPYTITKQRERWTEAEHNRFLEALKLYGRAWQRIKEHVGTKTAVQIRSHAQKFFTKLEKEAINNGTSPGQAHDIDIPPPRPKRKPNSPYPRKSCLSSETSTREVQNDKATISNMTNNSTAQMAGDAALEKLQRKEISEKGSCSEVLNLFREVPSASFSSVNKSSSNHGASRGLEPTKTEVKDVVILERDSISNGAGKDAKDINDQEMERLNGIHISSKPDHSHENCLDTSSQQFKPKSNSVETTYVDWSAAKASHYQMDRNGVTGFQATGTEGSHPDQTSDQMGGASGTMNQCIHPTLPVDPKFDGNAAAQPFPHNYAAFAPMMQCHCNQDAYRSFANMSSTFSSMLVSTLLSNPAIHAAARLAASYWPTVDGNTPDPNQENLSESAQGSHAGSPPNMASIVTATVAAASAWWATQGLLPLFPPPIAFPFVPAPSAPFSTADVQRAQEKDIDCPMDNAQKELQETRKQDNSEAMKVIVSSETDESGKGEVSLHTELKISPADKADTKPAAGAETSDVFGNKKKQDRSSCGSNTPSSSDIEADNAPENQEKANDKAKQASCSNSSAGDNNHRRFRSSASTSDSWKEVSE

SEQ ID NO: 396 - protein, 698 aa, Glycine max
MAVENQREDGGCDRFPVGMRVLAVDDDPICLKVLENLLRKCQYHVTTTNQAVEALTMLRENRNKFDLVISDVNMPDIDGFKLLELVGLEMDLPVIMLSAHGDTKLVMKGVTHGACDYLLKPVRIEELKNIWQHVVRRKNFDSRDQNKASNEEKAPNFAGGGSQGLRSENSADQNKRLGKKRKDQSDEEEEGGEENEDDEDPSAQKKARVVWSVELHRKFVAAVNQLGLDKAVPKKILDLMNVEGLTRENVASHLQKYRLYLKKAAQQANMVAALGGSDSYLRIGSIDGYGDFCTSSGSGRITNATLPSYASTGIFSRLNSPAALNMRGISSSALIRPVQSQNINSSLNTLGNIQPSIFPANQSSSLLQGIPTSIELNQSKQRNCTTGISQLSQVDSSGFTVASGFPDHRATVNGPNNSLPCVSNNHIMLQGNPQTHGPGAFSNQSSVRAASLCAESFDVGLCGSSNLLDHNRCNDNWQNAAQLSKFPANSLPLCEAFSNDQLPPTSINDSNSSTHIGNNSPVDFSSRMGISVPLEDTRNELRCQEGLIGNIVQPSSYTPRQRWEEHKLDYNQNMSCPFNSVNSHASSSGVTSSMGHVLNQNNTICSNRVDASSLVGQLNGASPSISRCTEVEKFSSDIRLKPNEAYILEQMKSQDGFMQNTFGTLDDIMGVMVKREQNESTLLDGEMGFDAYPVGSCN

SEQ ID NO: 397 - protein, 487 aa, Zea mays
MNRAHSSSSKLINEKLVEHRISTAKHCPHCGEKIDSKPFHPLRPQLASVPYYHETLGGATCFDGINCCNCKKDWVGLPAGVKFDPTDQELIEHLEAKVKDEGSRSHPLIDEFIPTIDGEDGICYTHPEKLPGVTRDGLSKHFFHRPSKAYTTGTRKRRKIQTECDVHKGETRWHKTGKTRPVMVNGRQKGCKKILVLYTNFGKHRKPEKTNWVMHQYHLGDLEEEKEGELVVCKIFYQTQPRQCSWSAASDRGAATALAATAAAAAAQEQHRRDSGSGSCSSRDHEAVSATSFPAGYTVTTAVEMQQHMKQPAADHFSFAPFRKTFDQEVGIGGDQVPSNQLGRSEPHHAGLGQQPHGPVLATKTAVPATAFLISRPSNPVSTIVPPAMQHASVVLDHDQFHVPAILLHHHDKFQLLFHFDIIITKNMQQQPHQHQQEQTQQKLDRRSASAGLEELIMGCTSSTNTKGVCFYSMHEREREREREREM

SEQ ID NO: 398 - protein, 362 aa, Helianthus annuus
MESDGDGGGTSSCLMSFGDTTNNINNNSSNNNNSNNNIGSLCLPPNPPGAYNTTTNNNNLIFSDHHPSAMMLEDNNININDGVGLAFMNPSSSVKAKIMSHPHYPRLLSAYLNCQKIGAPPEVVERLEEACRASVVAAMSSCSGGAGTSDGSGGGMNMIIGQDPALDQFMEAYCEMLIKYEQELSKPFKEAMLFLSRIESQFKAISISTSDSAGGEGGMDKNGSSEEEVDVNNNLIDPQAEDRELKGQLLRKYSGYLGSLKQEFMKKRKKGKLPKEARQQLLDWWTRHYKWPYPSEAQKLALAESTGLDQKQINNWFINQRKRHWKPSEDMQFVVMDAAHPHYFMENMNILGNPYPMDVSLL

SEQ ID NO: 399 - protein, 415 aa, Arabidopsis thaliana
MSFLSIVRDVRDTVGSFSRRSFDVRVSNGTTHQRSKSHGVEAHIEDLIVIKNTRWANLPAALLRDVMKKLDESESTWPARSWFRYSLLPFDIMSVILTTLLMVKPGPRDGIIQCYIKRDKSNMTYHLYLSLSPAILVESGKFLLSAKRSRRATYTEYVISMDADNISRSSSTYIGKLKSNFLGTKFIVYDTAPAYNSSQILSPPNRSRSFNSKKVSPKVPSGSYNIAQVTYELNLLGTRGPRRMNCIMHSIPSLALEPGGTVPSQPEFLQRSLDESFRSIGSSKIVNHSGDFTRPKEEEGKVRPLVLKTKPPRWLQPLRCWCLNFKGRVTVASVKNFQLMSAATVQPGSGSDGGALATRPSLSPQQPEQSNHDKIILHFGKVGKDMFTMDYRYPLSAFQAFAISLSTFDTKLACE

SEQ ID NO: 400 - protein, 290 aa, Oryza sativa (indica cultivar-group)
MEEWCCVAPGFRFHPTEEELVGYYLARKVVGQQDDGIIQEVDLNSIEPWDLLQAQQHDQEYYCYFFSYKDRKYPSARGTGTRTNRATAAGFWKATGRDKPVLSSSRSSSSPAVIGMRKTLVFYRGRAPNGCKTDWIIHEYRLVAHHQQPDGSCWVVCRAFHKPTTTTTLQHQLHLHRPPPLLHHPGYYDDQYLCPPPAAAGGGGLLCSPALDMELEDEEDESKMMILSNDNIPLVVSPTAVHTQGTGGDIINDATTAPAAAAAAADHRRHPELLAAGPIDTLLHHHHFTC

SEQ ID NO: 401 - protein, 189 aa, Helianthus annuus
CEMLIKYEQELSKPFKEAMLFLSRMESQFKAITFSNSDSGCGEGGMDRNGSSEEELDVDMNNGVVDPQAEDRELKGQLLRKYSGYLGSLKQEFMKKRKKGKLPKEARQQLLDWWTRHYKWPYPSEAQKLALAESTGLDQKQINNWFINQRKRHWKPSEDMQFVVMDAAHPHYFIDNIFGNPYPMDVSLL

SEQ ID NO: 402 - protein, 194 aa, Glycine max
MARSQQRYRGVRQRHWGSWVSEIRHPILKTRIWLGTFETAEDAARAYDEAARLMCGTRARTNFPYNPNASQSSSSKLLSATLTAKLHRCYMASLQMTRPSSQPETQRVVASPNVITSSASNFSMKSNETETMLLPQKRQEEEQEGEGNWVFKKVKVENAQQFKPLEEDHIEQMIEELLHYGSIELCSVIPAQAL

SEQ ID NO: 403 - protein, 338 aa, Solanum demissum
MGRSKCCDEEGLKKGPWTHEEDQKLLSFIDKYGCGSWRGLPAKAGLQRCGKSCRLRWINYLRPDIKRGKFSLQEERTIIHLHAFLGNRWSTIATYLPSRTDNEIKNYWNSRLKKRLMKMGIDPMTHKPNAAGSSKYVANLSHMAEWESARLEAEARLVRKSKILFNKNNNSHNYNINPTTISQQLPYHQQLPCLDILKAWQMTSTKLPTINDISHAILLNNSRNKNLESSIPSTLNSSENIFANNVPTTTKVADDHQNLHNLSTINSCFEDDQLQTELPSFMQEFSGVFPEYTQNSTNGLQVDNIMGSFYGDFEDNKLINWNNFPNYLVNSPIGSPVF

SEQ ID NO: 404 - protein, 272 aa, Oryza sativa
MAETNHLLLLLLSPPRLRLLSWTPTTPLACAALSRAAKLSRDLVSEKGERGIRSFKKNIAEQHMHASLGLDQLAAIGSLYQFIRGGGEGKEAASQEEEQTPKLRSVIAHLVSRKRRRDRINEKLKALQELLPNCTKTDKVSMLDEAIDYLKSLQLQLQMLVMGKGMAPVVPPELQQYMHYITADPSQIPPIRPSEPRPFQITHATQQRQSNVESDFLSQMQNLHPSEPPQNFLRPPKLQLYTPEQQRRGLASSSGHNSGWITERNSSYNFLE

SEQ ID NO: 405 - protein, 358 aa, Helianthus annuus
MEDYLGQNSSSSNTGTTSTTFLYGSGGVAPDTSCLYGRGGNESDPGHGGFHHPDQYHHPMVKIETEKFHNYPPSMVNFHNEDEALKAKIISHPHYSNLLQAYMDCQKVGAPPEVVGRLTAVRQEYEARQRANLGCRENYKDPELDQFMEAYYDMLIKYKEELTRPIQEAMEFMRRIESQLSTLTISSSSSSSPAGRIFISPDESKCEVIGSSDEEQENTSGGETEVAEIDPRAEDRELKNHLLRKYSGYLSSLKQELSKKKKKGKLPKEARQKLLSWWELHYKWPYPSESEKVALAESTGLDQKQINNWFINQRKRHWKPSEDMQFMVMDGLHPQNVATALYMGDHHYMGDGPYRLGP

SEQ ID NO: 406 - protein, 420 aa, Oryza sativa (japonica cultivar-group)
MNNVEEKAASDSKDENEKTANDESGQDKVLKKPDKILPCPRCNSMDTKFCYYNNYNVNQPRHFCKNCQRYWTAGGTMRNVPVGAGRRKSKSSSLHYRHLLMAPDCMMGSRVEISKSMNPEAFASAHSTPIQPIGRNETVLKFGPEVPLCESMASVLNIQEQNGTNAAAVPTGENQEDNSCISSITSHNVLPENAAQVDKNSTPVYCNGVGPVPQYYLGAPYMYPWNIGWNNVPMMVPGTSMPESASQSESCSTSSAPWMNMNSPMMPVASRLSAPPFPYPLVPPALWGCLSSWPATAWNIPWIRTNGGCMSPSSSSNSSCSGNGSPLGKHSRDSSLPLKEDKEEKSLWVPKTLRIDDPDEAAKSSIWATLGIKPGDPGIFKPFQSKGESKGQAASETRPARALKANPAALSRSQSFQETS

SEQ ID NO: 407 - protein, 175 aa, Triticum aestivum
  misc_feature (115)..(115): Xaa can be any naturally occurring amino acid
  misc_feature (142)..(142): Xaa can be any naturally occurring amino acid
  misc_feature (150)..(150): Xaa can be any naturally occurring amino acid
ATSYPAGYAMAAAVEMQHLKHSGDHFSFAPFRKSFEEVGIGADQVPSDQLGRSEHQQHAGQEQQPHRPELATTAVPATSFLISRPTNPISATVPPPLQHTSVVLDHDQFHVPAIXLHHDKFQNMQQQQQHQQKIDRKSAGLXKLVMGALXSQKKLILIQENGLPYWLLKTWIYNR

SEQ ID NO: 408 - protein, 141 aa, Glycine max
MKNSLFLLHNANTIHFNLHSQITLPSIPLTTITTTKPFPHNRHFPRIEIDMVKNSQGIYAPKASKVVVLWDLDNKPPRGPPYDVAISLKTLAARFGDLVDFSAYANRHAFVHLPQWVLQQRRDRKNLDILERKGIITPPEP

SEQ ID NO: 409 - protein, 174 aa, Zea mays
MIRFGGEPSPVSDPSRRPLLTISLPPASHAWGPAAVPLEAPGAAALDANDFRKYRGVRQRPWGKFAAEIRDPKKRGSRVWLGTYDTAIEAARAYDRAAFRMRGAKAILNFPNEVGTRGADFLAPPPPPPQAAATPRPRPGPEPEPSQPSPSRPRRPGRRRRRCLPRQRPPRPRR

SEQ ID NO: 410 - protein, 129 aa, Brassica napus
  misc_feature (99)..(99): Xaa can be any naturally occurring amino acid
  misc_feature (124)..(124): Xaa can be any naturally occurring amino acid
MEADDGGNNSSHASKQRLRWTHELHERFVDAVAQLGGPDRATPKGVLRVMGVQGLTIYHVKSHLQKYRLAKYLPDSSSEGKKTDKKESGDVLSGLDGSXGTQITEALKLQMGVQKRLHEQLEVXRQLQL

SEQ ID NO: 411 - protein, 334 aa, Pisum sativum
MDGREAMAFSGGPGSYYLHRGGVEAAGSGSGGFQVPPGFRALPNNGIIAQPNVRAQGGNGDTSSMFSLEPQSHADFNHDISVGASSGAPSSEPVKKKRGRPRKYGPDGSVSLKLSPMSAPANSTQDSGTPSEKRGRGRPRGSGRKQQLAALGDWMTSSAGLAFSPHVITIAAGEDIAAKLLLLSQQRPRALCILSGTGIASKVTLRQPASTNAGVTYEGKFQILSLSGSYLVSEDGGPTNRTGGISVSLSSRDGHVIGGSVAMLIAGSPIQLVVCSFVYGGGSKVKTKQGMITNGESSEPHNDNLGSPASAPPDQNYISSPTGMWPGSQPSDMK

SEQ ID NO: 412 - protein, 183 aa, Glycine max
YLTVSRNIIDSNFLLICRKTRIWLGTFETAEDAARAYDEAARLMCGTRARTNFPYNPNASQSSSSKLLSATLTAKLHRCYMASLQMTRPSSQAEPQRVASPNVITSSASNFSMKSNETETLLLPQKRQEEEQEAEGNWVFKKVKVENAQQFKPLEEDHIEQMIEELLHYGSIELCSVIPPQAL

SEQ ID NO: 413 - protein, 204 aa, Oryza sativa (japonica cultivar-group)
MGRPPCCDKVGVKKGPWTPEEDLMLVSYIQEHGAGNWRAVPTNTGLMRCSKSCRLRWTNYLRPGIKRGNFTEQEEKLIVHLQALLGNRWAAIASYLPERTDNDIKNYWNTHLKKKLKKMQAAEGGEDSGAASEGGGGRGDGDGGGKSVKAAAPKGQWERRLQTDIHTARQALRDALSLDHPDPSPATAAAAATPAGSSAAYASS

SEQ ID NO: 414 - protein, 375 aa, Populus alba x Populus tremula
MGRAPCCEKNGLKRGPWTPDEDQKLIGYIQKHGYGNWRTLPKNAELQRCGKSCRLRWTNYLRPDIKRGRFSFEEEETIIQLHGILGNKWSAIAARLPGRTDNEIKNYWNTHIRKRLLRMGIDPVTHSPRLDLLDLSSILNSPLYDSSRMNMSRILGVQPLGDPELLRLATSLLSSQRDQTQDFAIPNGHQENHLSSPQVHQNQNQSIIHQANQFQPAGQEMPACTALTTTPCVTFSNEAQQMDPNGDQYHLSTITTFSSPNSQVSTHDQWQSNRMGSNLSEDYYVPAVSSYNSADNCRGTDLVDPSSEASTFISNNSNQTFGFASVLSTPSSSPAPLNSNSTYINCSSTEDERDSYCSNFLKFEIPDILDVSNFM

SEQ ID NO: 415 - protein, 347 aa, Pisum sativum
MDGREAMAFSGGPGSYYLHRGGVEAAGSGSGGFQVPPGFRALPNNGIIAQPNVRAQGGNGDTSSMFSLEPQSHADFNHDISVGASSGAPSSEPVKKKRGRPRKYGPDGSVSLKLTPMSAPANSTQDSGTPSEKRGRGRPRGSGRKQQLAALGDWMTSSAGLAFSPHVITIAAGEDIAAKLLLLSQQRPRALCILSGTGIASKVTLRQPASTNAGVTYEGKFQILSLSGSYLVSEDGGPTNRTGGISVSLSSRDGHVIGGSVAMLIAGSPIQLVVCSFVYGGGSKVKTKQGMITNGESSEPHNDNLGSPASAPPDQNYISSPTGMWPGSQPSDMKSAPAHTGIDLTRG

SEQ ID NO: 416 - protein, 427 aa, Solanum ochranthum
IRKPYTISKQRERWSEEEHKKFLEALKLHGRAWRRIEEHVGTKTAVQIRSHAQNFFSKVVRESSNDDASSVKSIEIPPPRPKRKPMHPYPRKMATPRKSGTLASEKLKRSGSPDFCLSEPENQSPTSVLSALGSDAFGTVDSTKPSELSSPVSSAVAENSGDLVLSEPSDFVVEESRSSPARAYASSNPANQACVKLELFPEDNDFVKEGSDEASSTQCLKLFGKTVLVTDAHMPSSTSGQISLTDENDDEPASQTLPRSSFPAKYLLWDSECPRSTFSIVPPSPSYYFPTPNGSPGPNQSGAATHLPWGSSCAVPCTQVHSPIPMKGSPLFNDRELEGKETQKEGSSTGSNAESVDAEYLEIEAQSSRNVVESVRASVPSLFERRANSTKRVKGFVPYKRCLAERGMSSSTLTGEEREEQRTRLCL

SEQ ID NO: 417 - protein, 138 aa, Oryza rufipogon
SDDKALKRHLLRKYSGYLGGLRKELSKKRKKGKLPKEARQKLLTWWELHYRWPYPSEMEKIALAESTGLEQKQINNWFINQRKRHWKPTEETQFAVMEAYHHQSTDAAAAFYVDVDARLVGATAVAPASAVYTARPDH

SEQ ID NO: 418 - protein, 229 aa, Triticum aestivum
MARGKVQLRRIENPVHRQVIFCKRRAGLLKKARELSVLCDADIGIIIFSAHGKLYDLATTGTMDGLIERYKSASGEGVAADGCGDQRVDPRQEAMVLKQEIDLLQKGLRYIYGNRANEHMNVDELNALERYLEIWMFNIRSAKMQIMIQEIQALKSKILYMQEGMLKAANEILQEKIVEQHGLIDVGMTIADQQNGHFSTVPLLEEITNPLTILSGYSTCRGSEMGYSF

SEQ ID NO: 419 - protein, 391 aa, Zea mays
MSNLTSSTSGGPNAAPAAAAAAPPAPAASGNNKRKRSLPGNPDPEAEVVALSPATLMATNRFVCEICGKGFQRDQNLQLTRERPQPAEAQRRKVYVCPEASCVHHDPARALGDLTGIKKHFFRKHGEKKWKCDKCSKKYAVHSDWKAHSKICGTREYKCDCGTIFSRRDSFITHRAFCDALTEESAKAIGLNAMAAVPAQHHHHPMLFSPPPTHVMQQDVALLQEHHHQEVMQQEHCNYAMKTEMPPWPGMTYDHPLLQPLCNAAAPQSSATSTPPPPTTMQLPAAYAHLSATALLQKAAQMGATVAGAGYTQMAGAATSATFGLGLPDLQNTQQQQHQDGEIMAGLARTASHGRGGEEGGGGGGDGMTRDFLGLRAFSHRDILGLAGLDS

SEQ ID NO: 420 - protein, 178 aa, Zea mays
MAEAPASPGGGGGSHESGSPRGGGGGGSVREQDRFLPIANISRIMKKAIPANGKIAKDAKETVQECVSEFISFITSEASDKCQREKRKTINGDDLLWAMATLGFEDYIEPLKVYLQKYREMEGDSKLTAKSSDGSIKKDALGHVGASSSAAQGMGQQGAYNQGMGYMQPQYHNGDISN

SEQ ID NO: 421 - protein, 138 aa, Glycine max
MDGSWSEGKRSMSYKEEDEYEEEEEEEVSEYGDDGKKKRVVSNKRGSKAGGSVPPSCQVDGCNADLSEAKPYHRRHKVCEYHAKAPAVVIGDQHQRFCQQCSRFHELSEFDDSKRSCRRRLAGHNERRRKNASEYHGL

SEQ ID NO: 422 - protein, 478 aa, Rhodospirillum rubrum ATCC 11170
MHRILMVEDSPSNAELYATYLRASGMTVTLAGTGGQALDYLVADASAFDLVVLDLGLPDMDGLEILRKLGGPAAMPPTVVLTGSGSVRRAVEAMREGAIDFLVKPCGADKLRTAVEEALERRTPTAEGRAPAADPTRAKRGPSGFLGSSPAMSNVFSLIEAAAASSTASVFITGETGTGKELCANAIHNLSDRRNGPFVAINCGAIPRELMESEIFGHRKGAFTGAINDREGAASRADGGTLFLDELCEMDLDLQVKLLRFIQTGTYRKVGDGADRQVNIRFVCATNRDPLVEVKAGRFREDLYYRLYVVPIHLPPLSARGDDIILLARRFLADFSKLEGKRFQEFSADALGRIMAYRWPGNVRQLENVVRNIVVLNDGVTVEPTMLPPPLDCVEAVVSLPVDPQSATGAVVGGGTLSLDEILARPLAELEAMAIDAALRLSDNNVTRAARLLDVSPSTIYRKHSAYKSGGTGGSAGR

SEQ ID NO: 423 - protein, 508 aa, Zea mays
MDAHTTHIVARKNTSLSFTSNELMDHFPFAWLPMDPFTAMALSGTLSPLFSTTSTNDTMYNLNPALYASLVPPIRKPATPTTLEVGRQCKEDEDASIRPVHLLITCTSAIETGDYSIAQGNLSEARKILGEIPTSTGIGRVGKHFIDALVQRLFPAYPHAAPPSPSPSTSIDLHNNFYDAGPYLKFAYSTANQAILKAIKGYNHVHIIDFSLMQGLQWPALMDVFSAREGGPPKLRITGIGPNPIGGRDELHEVGIRLAKYAHSVGIDFTFQGVCVDQLDRLCDWMLLKPIKGEAVAINSILQLHRLLVDPDANPVVPAPIDILLKLVIKINPMIFTVVEHEADHNRPPLLERFTNALFHYATMFDSLEAMHRCTSGRDITDSLTEVYLRGEIFDIVCGEGSARTERHELFGHWRERLTYAGLTQVWFDPDEVDTLKDQLIHVTSLSGSGFNILVCDGSLALAWHNRPLYVATAWCVTGGNAASSMVGNICKGTNDSRRKENRNGPME

SEQ ID NO: 424 - protein, 325 aa, Medicago truncatula
MGRPPCCDKEGVKKGPWTPEEDIILVTYIQEHGPGNWRAVPTKTGLSRCSKSCRLRWTNYLRPGIKRGNFTEQEEKMIIHLQDLLGNRWAAIASYLPQRTDNDIKNYWNTHLKKKLKKSQTGNNAECINFEEEKFSASQRIPRGQWERRLQTDIQMAKKALNEALSPQKLSPNFSTSNPTNSNSFSSTKEPGQSFCYASSADNIARLLKGWMKNPIKSSVSTNSVVTQNSFNNFDSASSSGTKGEILSETFESLFGFEPLESLESSNSEFSHQSLSPDATILQDESKPDVGSETMPFSLLEKWLLDEASCPEKVLGCGGDHAQVF

SEQ ID NO: 425 - protein, 144 aa, Brassica napus
MSFRSIVQDLRDGLGSLSKRSFDFRLHKGKGSSFRDYSSSRDLLSPLIVQTSRWANLPPELLLDVIRRLEESESNWPARKHVVACASVCRSWRAMCQEIVLCPEISGKLTFPVSLKQPGPRDTMIQCFIKRDKSKLTFHLYLCL

SEQ ID NO: 426 - protein, 378 aa, Solanum tuberosum
MRVLMEERNDKEKNMDEVMLPGFRFHPTDEELVGFYLRRKVQQKPISIELIKQLDIYKYDPWDLPTELAAVGEKEWYFYCPRDRKYRNSARPNRVTGAGFWKATGRAAKGIKTDWMMHEFRLPSITDSTAPKRFLDKHIPPNDSWAICRIFKKANSNAHRALSHSWVSPPQVLPQNNTTSHDFLTSSHFTNNSNEMSSFIHKTSSTSPIQFNDLLQNSSNNNMSSSFTTLDLPLYKTLNSMSNHNNDPITSYTFSSSCVDNMNNIDASSLLLNMSSSIFGDYSIVLPDNMEGGGVHDDTTTTTLKEANNVIINNMEHMEELQWGNVVRSNNIGVLPLMNNFPLNMAVDAWKTNLLWDSSSPCPSSEMSTSYSTNKCYT

SEQ ID NO: 427 - protein, 229 aa, Triticum aestivum
  misc_feature (198)..(198): Xaa can be any naturally occurring amino acid
HSRTSLYKKAGWYRSGIPGISSTHASAIEHLEQQQAMAMAAVASSTMEVDQDLPGFRFHPTEEELLGFYLSRVALGKKLHFDIIGTLNIYRHDPWDLPGMAKIGEREWYFFVPRDRKAGSGGRPNRTTERGFWKATGSDRAIRSTGDPKRVIGLKKTLVFYQGRAPRGTKMDWVMNEYRLPDNGAPPPQEDTVLCKVXRKETPPKELNQKPFQMEGNEPKVPGETGGYG

SEQ ID NO: 428 - protein, 219 aa, Gossypium arboreum
MSMKKEGEILYKKGLWAMEEDKLLIDYVNVHGKGQWNKIANRTGLKRSGKSCRLRWMNYLSPNVKKGDFSEEEEDLVIRLHKLLGNRWSLIAKRVPGRTDNQVKNYWNSHLRKKLGIIDQNKTRIDFCQSSKQVKVCHVDEAATDPSPGHGTTTETTGITVDQSNQQEVIDHRVLNNTTQESMTTESYINTFWIPDHDYELSTLAMIDHFHECSSFHLS

SEQ ID NO: 429 - protein, 587 aa, Arabidopsis thaliana
MKRDHHQFQGRLSNHGTSSSSSSISKDKMMMVKKEEDGGGNMDDELLAVLGYKVRSSEMAEVALKLEQLETMMSNVQEDGLSHLATDTVHYNPSELYSWLDNMLSELNPPPLPASSNGLDPVLPSPEICGFPASDYDLKVIPGNAIYQFPAIDSSSSSNNQNKRLKSCSSPDSMVTSTSTGTQIGGVIGTTVTTTTTTTTAAAESTRSVILVDSQENGVRLVHALMACAEAIQQNNLTLAEALVKQIGCLAVSQAGAMRKVATYFAEALARRIYRLSPPQNQIDHCLSDTLQMHFYETCPYLKFAHFTANQAILEAFEGKKRVHVIDFSMNQGLQWPALMQALALREGGPPTFRLTGIGPPAPDNSDHLHEVGCKLAQLAEAIHVEFEYRGFVANSLADLDASMLELRPSDTEAVAVNSVFELHKLLGRPGGIEKVLGVVKQIKPVIFTVVEQESNHNGPVFLDRFTESLHYYSTLFDSLEGVPNSQDKVMSEVYLGKQICNLVACEGPDRVERHETLSQWGNRFGSSGLAPAHLGSNAFKQASMLLSVFNSGQGYRVEESNGCLMLGWHTRPLITTSAWKLSTAAY

SEQ ID NO: 430 - protein, 155 aa, Brassica oleracea
MKKLEADDTKPPEPPKDYIHVRARRGQPADSHRFAERVRREKISEMLTLLQDLVPDSSRITGKADSLDEIINYVQSLKRQVELLYMKLATINPRMESNRNAALSIKVKENMLYAIACSEQRLPLGYYSLAQNMPRFSDTQFLSNYGFVQTKVISR

SEQ ID NO: 431 - protein, 198 aa, Arabidopsis thaliana
ADPRDRDISAQRFAMNGRSMRLPPGFRFDPDDEDLVFEYLAKKVLHRPMDFDLPELRSCNVDPWDLLGEKNKEVYYFVKKEERERKGRETLSGYWEECEEEEVMEAGGRDCIHLEGRRKTFAFFIGKKPRGTITPWIMYEFRLLSSRATRWSSSPLPRGEVGKWRAVKVVVKEENDEEMVEDEHESDESDGEEVIQSR

SEQ ID NO: 432 - protein, 641 aa, Oryza sativa
MMGGGLVMDQGMMFPGVHNFVDLLQQNGGDKNLGFGALVPQTSSGEQCVMGEGDLVDPPPESFPDAGEDDSDDDVEDIEELERRMWRDRMKLKRLKELQLSRGKDPAGGVVGDPSKPRQSQEQARRKKMSRAQDGILKYMLKMMEVCRAQGFVYGIIPEKGKPVSGASDNLRGWWKEKVRFDRNGPAAIAKYQADNAVPGFESELASGTGSPHSLQELQDTTLGSLLSALMQHCDPPQRRYPLEKGVPPPWWPTGDEEWWPELGIPKDQGPPPYKKPHDLKKAWKVSVLTAVIKHMSPDIEKIRRLVRQSKCLQDKMTAKEISTWLAVVKQEEELYLKLNPGARPPAPTGGITSAISFNASSSEYDVDVVDDCKGDEAGNQKAVVVADPTAFNLGAAMLNDKFLMPASMKEEATDVEFIQKRSASGAEPELMLNNRVYTCHNVQCPHSDYGYGFLDRNARNSHQYTCKYNDPLQQSTENKPSPPAIFPATYNTPNQALNNLDFGLPMDGQRSITELMNMYDNNFVANKNLSNDNATIMERPNAVNPRIQIEEGFFGQGSGVGGSNGGVFEDVNGMMQQPQQTTPAQQQFFIRDDTPFGNQMGDINGASEFRFGSGFNMSGAVEYPGAMQGQQKNDGSNWYY

SEQ ID NO: 433 - protein, 136 aa, Brassica napus
MATKDSPGIKLFGKTITFNADNNNIIQTIKKEEGQEQQPELQTKTAVRSPSSSDLMAEKRPDKIIACPRCKSMETKFCYFNNYNVNQPRHFCKGCQRYWTAGGALRNVPVGAGRRRSKPPGRAGGFSELLGAATGV

SEQ ID NO: 434 - protein, 437 aa, Zea mays
MSFRSIVRDVRDGFGSLSRRGFEVKFLGHRRGRSHGAVHELRDPAPVIQSSCWANLPPELLRDVIERLEASEATWPNRKSVVSCAAVCRTWREICKEIVKNPEFSGKITFPVSLKQPGPRDVTIQCFIKRDKSTQTYYLYLCLSTAVLVESGKFLLCAKRTSRPTCTEYTIFMNSENLSRSSKMYIGKLRSNLLGTKFAIYDTQPPCNAAEPGKTSRRFYSRKVSPKVSSSTYNIAQVSYELNVLGTRGPRRMNCVMHSIPTSCLEAGGTVPSQLDSILARSTDESFGSISFSKSSVVDRSMRFSSSRFSDISMSSSRRIGDTASGDNDECKERPLILRNKAPRWHEQLQCWCLNFRGRVTVASVKNFQLVAATQPAAGAPTPSQATPVPPPEHEKVILQFGKVAKDMFTMDYRYPLSAFQAFAICLSSFDTKLACE

SEQ ID NO: 435 - protein, 359 aa, Lycopersicon esculentum
FISPDIAKIRKLVRQSKCLQDKMTAKESATWLAIINQEEVLARELYPDRCPPLSSGGSSGTFTMNDSSEYDVEGAIDDPIFDVQEQKPNHLSLLNVNVEMFKEKLPLLQQSQPMKGDIFANLDFTRKRKPADDLTFLMDPKTYTCECLHCPHSELRNGFPDRSSRDNHQLTCLFRNTSQFVVPNFHMEEVKPVVFPQQYVEPKRASLPVNPAPPSFDTSGLGVPADGQRVINELMSFYESNVQGNKSSMAGNSVMSKEQPLQQPSIQQNNYLQSQGNVLEGSIFGDTNISASNSMFVQGDRFDQSKVLTSPFNASSTDDFNFMFGSPFNMQSTDLSECLSGISHDDVKQQDVPVITSEF

SEQ ID NO: 436 - protein, 964 aa, Medicago truncatula
MEYPYYSKGGGIGYWQSPGTQFEGPTSLDGGINNLVSEDMPNSFSELMNFDTYAGLCSGPSTTDQIMTNELPSLASALYQLPDGFNPVEPNSGQFYGGNYNNFESSPIFGEKIVCQQMDTLLGFLDNSNDANNSSSRQKFDDPSQHVNAFDMGNYVIARPQALISRPPALSLDERMLKALSFFKESAGGGILAQVWVPIKHDGQVLLSTSEQPYLLDQMLAGYREVSRTFRFSTEGKPGCIPGLPGRVFISKVPEWTSNVGYYNPKEYLRAEHARNHEVRGSIAFPIFDLHSGLPCSAVLELVTTKEKLDFDRELEIICRSLQLVNLRTTASSRLLPECLSTNKRAALTEIVDVLRSVCYAHRLPLALTWIPCFYTDGTRDETTRIQIKEGNSSSREKNILCIEESACYITDRVMEGFVHACIEHPLEEGNGVAGKALQSNHPFFYSDVKTYDISEYPLVHHARKFNLGAAVAIRLRSIYTNNDDYILEFFLPINMKGSSEQQLLLDNLSGTMQKICKSLRTVSGAEISGMESSVVGFGKKNVPSFPSTSTRNSQVSLINEKDGSVQKLSLDTSNLRNNGNKPSCNQENNGSRRRVEKKRNTSEKNVSLSVLQQYFSGSLKDAAKSIGVCPTTLKRICRHHGISRWPSRKINKVNRSLKKIQTVLDSVQGVEGGLKFDPSSGAFVAGGTTTEEINENKSLLFPERSTTQDSEPMSQNAVSVPSEDENLENKWEGKLKETNTCSIDCSEDSKSFAMDDCPEQAYIGSVLAKCDEWVLNNGGLREEKRKHSTIGQRTSSFAVDEMDTGADGDDDDVVEHNHPTSSSLTDSSNGSGSMIHGSSSGYQNFKNQKPSKGKSTIVDSGSKIVVKATYGEDTIRFKFDPSTGYYKLYEEVAARFKLQDGSFQLKYLDDEEEWVMLVNDSDLQVCLEILNDMGTHNARFLVRDIPCTFGSSGSSSCYLGGSS

SEQ ID NO: 437 - protein, 543 aa, Solanum demissum
MEVNLRGLSNSFSFSFSRAPWDAIDGKLMVVKVHRAYRNGGENIEWRKPVPWVFLVALYFILIEFTLDYILMKYAFFTIPQNQVEGAQQGASSMISSKLETVATQGKAPTCLANENVLKVNIPPMNVFQARKPYTITKQREKWTEEEHQRFLEALKLYGRAWRQIEEYVGSKTAIQIRSHAQKFFAKIARDSGNDGDESLNAIDIPPPRPKKKPLHPYPRKIADSSVANKAVSSQPERSPSPNASGRDSCSPDSVLPAIGLGAAEYSAAEQQNSRFSPVSCTTDAHTANVISAENDGESMSSNSNTVEEIHVALKPVAASTCPITNSEFMECDIVHMENSCNGEKLAVEPPSASIKLFGKTVFVPDANNLAPPALYNTEKEIEISNEDVLHAFQANQANSPFILAMVPGNMIPPASWLSQNMLENNPESTAAFPAATISWWSWYQDLIYRSISSCGQTAVGTAAHCQGPKDEEPQREGSSTGSSIGSASEVDDGNRSSETVESKCTTKSKGFVPYKRCLAERDGKSSGAVLEERESRRVRVCS

SEQ ID NO: 438 - protein, 314 aa, Helianthus annuus
MALGFSDRNTEMSPYSQQSNTSAVPMDSSKKRKTRSRKEAPEKVAATLAKWIEYNKANEDGKAKTRKAPAKGSKKGCMKGKGGPENSRTNFRGVRQRTWGKWVAEIREPNRGRRLWLGTFGSAVEAALAYDEAARAMYGTSARLNLPNCRSKNDILPLLVTNPASSCDSTTTCSYSEVDATHDSKPGPAVFPSVKHEESVQVKHEPEIVAKEEHCVDNNDLGFDIGDEMFDLEELLGAVEDSNPEAGSGDGYDGRFVNGADANENMQMYMQPDPCVSGQDYSFDFLQPGRPEDCSFTLEELGLGLDAELDLYSN

SEQ ID NO: 439 - protein, 296 aa, Rhodococcus ruber
GSGHDATLPLPGHPGREWPGPLRSDGPAWHDGPAVNETTDTLTVLAVDDEPPALDELAYLLRRREEIGHVHTAGEATTALRLLRDGGIDAVFLDINMPGLDGLELAGILRNFANPPAVVFVTAHDDRAVAAFDLGAVDYLLKPLREERLAEAVRRIAERRRTRETESAAAGAAASDEVIPVELGGVTTLVPRSSVQWVEADGDYARLHTGTGSHLVRIPISTLESRWADAGFLRVHRSYLVALPLVTGIRSVGSGLVVCLRAEEGKPAVELPVSRRHTRELKDRLIRGPMQTWTSR

SEQ ID NO: 440 - protein, 250 aa, Crocus sativus
MGRGRVQLKRIENTINRQVTFSKRRAGLLKKANEISVLCDAEVALIIFSTKGKLSEYSTDARMESILERYDRYSSAERAIVAPDPDSQESWRDEYGRLKAKLEALQTSQRHLMGAQLDMLSVKELQQLEQQLENALKNIRTRKNQLMFDSISELQKKEKTLVSQNKDLEKKLIEKEKGKAMAQQGHWDQQGQQYTESSSPPSLLIQDPFPSLTIGINPASGSSEEDYEARPLPPANSNRLPPWMIRSANE

SEQ ID NO: 441 - protein, 246 aa, Crocus sativus
MGRGRVQLKRIENTINRQVTFSKRRGGLLKKANEISVLCDVDVALIIFSTKGKLSEYSTDARMETILERYERYSFAESAIAVPEAESQGSWLNEYGRLKARIESLQTSQRHLTGVQLDMLNVKEMQELEQKLESAMKNIRSRKSQLLFNSISDLQTKEKALVDRNNDLKKKIAEKERKRTSAQQGHQDQQGQQYVDPTSPLSFPVQDPPSLTMGINPARSTSDEDRPLPQVNSSKLLPWMIRSVNG

SEQ ID NO: 442 - protein, 1051 aa, Arabidopsis thaliana
MANASQLSPTNKHFFKPLLPGFQRNLNIPVKFFSEHIEGKHEGETVKLRADASKRTWEVKMDGNRLTEGWKEFVEAHDLRIRDFVVFRHEGDMVFHVTALGPSCCEIQYPQSISHEEGEESGEVEISEREVEENLQKEYDQSSADLNCFSQSVTHSNISNDLVTLPRDFAKRNGLDKGMHEIVLMNEEGKSWESEVRSRMSGQVFIVGGWKSLCSENKLKGGDSCTFKLLQNAKTPVFQLCSRIGESRFVKLTPTLNSLEIGKQHLPVSFTKGNGLIHPGEIILVDKDRVEWSMKLQVDNRGGMHIFGGNDWKSFCAANEVGAGESLTLELIRGGLSPLFKFFSKQPSFEAEDRRHKRARVHNGSQETDKGEPSRATKMGPELEKREKTAEKGEPSRASNKSSGKQGNLQKTQACSVTDHVAKVGFPLDLSVFTRLIATLFFLAVGVFYFLKNTAAKYFDIGAAAAGGFDRDFMAVDAEDCSVCGNFSTKKCSRCKSVRYCSAECQRSDWSSGHQRNCRDYGITTLTPSAKNGLRFRASPFGDSSASSIALISERGQNKSSLKPREVLFPYEEFVEYFNWDNPELAPCGLMNCGNSCFANVILQCLSWTRPLVAYLLEKGHKRECMRNDWCFLCEFQTHVERASQSRFPFSPMNIISRLTNIGGTLGYGRQEDAHEFMRYAIDMMQSVCLDEFGGEKIVPPRSQETTLIQYIFGGLLQSQVQCTVCNHVSDQYENMMDLIVEMHGDAGSLEECLDQFTAEEWLHGDNMYKCDRCSDYVKACKRLTIRRAPNILTIALKRYQGGRYGKLNKRISFPETLDLNPYMSEGGDGSDVYKLYAVIVHLDMLNASFFGHYICYIKDFCGNWYRIDDSEIESVELEDVLSQRAYMLLYSRIQARSSSSCLRSEVKDEKKTDTLDTESCVKELVESSMVGAIESRSSTHATIEDPVCEQSPSPSPSPSPSPSPSPSPSVLASECCSEVERIDTLDSESNSSIDDSATDHQEDVANGNKDPEVKYQAADSWSDPTTSTPLVCTKSKPPVRDMDTKMIDAQ

SEQ ID NO: 443 - protein, 643 aa, Zea mays
MMGGGLLVDQSVVFPGVHNFVDLLQQNGDKNLGFGSLMPQTSSGDQCVMGEGDLVDPPPDSFPDAGEDDSDDDVEDIEELERRMWRDRMKLKRLRELQQTGGKDSLASGVGLADGSSKPRQSQEQARRKKMSRAQDGILKYMLKMMEVCRAQGFVYGIIPEKGKPVSGASDNLRAWWKEKVRFDRNGPAAIAKYQADNAVPGAENELASGAASPHSLQELQDTTLGSLLSALMQHCEPPQRRFPLEKGVPPPWWPTGDEEWWPELGIPKDQGPPPYKKPHDLKKAWKVSVLTAVIKHMSPDIEKIRRLVRQSKCLQDKMTAKEISTWLAVVKQEEELYLRLNPGARPPASTGGIASAISFNTSSSEYDVDIIDECKGDEAGNQRTAVTDPTAFNLGAAILSDKFLVPTPMKEETADVEFIQKRNAPAAAEPELMLNNRVYTCNNVQCPRSDYSYGFLDRNARNSHQYTCKHKDPTPQSTENKPPSAPPQPQAFQPAFSQPNQALNSVDFSLPMDGQRSIAELMNMYDNNFVPNKNPSSDSVAVMERPNAMPQQRIQMDEGFFVQGNGAFDDVNSMMQQQQQQHQAPVQQQQQFFIRDDTPFVSQMGDIAASAPEFRFGHGFNMSSGVDYPGAAQRNDGTNWFY

SEQ ID NO: 444 - protein, 848 aa, Brassica napus
MASSEVSMKGNRGRGENFSSAGYSDPTVAGEAQKTQSNRSVAAERVVDPEAALYRELWHACAGPLVTVPRQDDRVFYFPQGHIEQVEASTNQAAEQQMPLYDLPSKILCRVINVDLKAEADTDEVYAQITLLPEPVQDENSIEKEAPPPPPPRFQVHSFCKTLTASDTSTHGGFSVLRRHADECLPPLDMSRQPPTQELVAKDLHASEWRFRHIFRGQPRRHLLQSGWSVFVSSKRLVAGDAFIFLRGENGELRVGVRRAMRQQGNVPSSVISSHSMHLGVLATAWHAISTGTMFTVYYKPRTSPSEFIVPFDQYTESVKINYSIGMRFKMRFEGEEAPEQRFTGTIVGIEDSDPTRWAKSKWRSLKVRWDETTSIPRPDRVSPWKIEPALSPPALSPVPMPRPKRPRSNLASSTPDSSMRIREGSSKANMDPLPASGLSRVLQGQEYPTLRTKHVESVECDAPENSVVWQSSTDDDKVDVISASRRYENWISSGRHGPTCTDLLSGFGTNIEPPHGHQIPFYDRLSSPPSVAARKILSDQDGKFEYLANQWMMHSGLSLKLHESPKVPAASDASFQGIGNPNYGEYALPRAVTTENAAGNWPIRPRALNYFEEAVHAQAREHVTKRPAVVQEEAAKPRDGNCRLFGIPLVNNVNGTDTTLSQRNNLNDPAGPTQMASPKVQDLSDQSKGSKSTNDHREQGRPFPVSKPHPKDVQTKTNSCRSCTKVQKQGIALGRSVDLSKFQNYEELVTELDRLFEFNGELMAPKKDWLIVYTDDENDMMLVGDDPWQEFCCMVRKIFIYTKEEVRKMNPGTLCCRNEEEPVVGEGSDAKDAKSASNPSLSSAGNS

SEQ ID NO: 445 - protein, 375 aa, Musa acuminata
MAGIGLELRLCASRTVGGFVKQVAAVVESTDRGVAKLEESVRSLEEERRKIDAFKRELPLCMLLLTDVIEGLKKELERCRGQKLANAFEEFIPIRRKCEEEAGVKLEADYEDKKNWMSSAQLWSVNSSENNDEDDKSITDERNGRPDCDAEKESLNLESKNLSAGGAFVQFKGISALAMKPKEEVKPLPDLSLRSPAVKSNSCPVSAVTEHQAGGVSGSKGVGRAPPAMTGAHLSLQVMQQTPRKARRCWSPELHRRFVLALYQLGGVRVATPKQIRELMKVDGLTNDEVKSHLQKYRLHSRKLPNASASFSRPPMVLGGLWVPPENHTVSPQQSDSQSGSPQSSLRLAGCDGTISAAAGASCEEEGKSESCNGR

SEQ ID NO: 446 - protein, 209 aa, Brassica napus
MGDSDRDSGGGQTGNNQNGQSSLSPREQERFLPIANVSRIMKKALPANAKISKDAKETMQECVSEFISFVTGEASDKCQKEKRKTINGDDLLWAMTTLGFEDYVEPLKVYLQRFREIEGERTGLGRPQTGGEAGEHQRDGGVGDGGGGYYGGGMGMQYQQHHQFLHQQNHMYGSTGGWWRRPQWRKELKRFGEVDLLYIEIHIYSSKVF

SEQ ID NO: 447 - protein, 427 aa, Zea mays
MGRHSCCYKQKLRKGLWSPEEDEKLMNHITKHGHGCWSTVPKLAGLQRCGKSCRLRWINYLRPDLKRGAFSEEEEDLIVELHAVLGNRWSQIATRLPGRTDNEIKNLWNSSIKKKLRQKGIDPNTHKPLLVEVERSKAAPTTSTERTSESSDVDPSSGGALGNSSHLLLSETAQSPQLPALGKHRRETTSLAHLRVPPKELFLDQLVSGHENLTGCRTAGPVPNFPFQQLMCYSNEFGNKNGASNNSLWFNHNETSGSTISTVMPPVSPSTLSTSTGLNRSPDNPHSGGTAIQSTQFYWDTANPSSCSSRGSSGSNGLGFELQSTSSLLESSVFPWTELTPDKNSQVHLGEELKWPDLLHGTFTDTPATMQNLSQSLYEDVIKAESQFNIEGLCAAWSQNLQPQQHLQVSDLYDKDLQRMSLSFENI

SEQ ID NO: 448 - protein, 329 aa, Coffea canephora
MCGGAILEGLIPPRNNNDGTRRLSSADLWPSAADFWPNSHLAKPSRSNPTDAPHKATHETCHDPHDEAGGKQQVLPKGAKRQRKNLYRGIRQRPWGKWAAEIRDPRKGVRVWLGTFNTAEEAARAYDKEARKIRGKKAKVNFPNEDSTSYPTCIPSQTQYQQVHIPSPPTFCGPSSSNCKFNQLRVGSSDCSASDCYHANSIDDCARFTNMMGFRNPSEEVSGSGSSDNECFLGHLKQVAKAAAEEEAASVITENDTKDNNKAAESEEYQVEKLSEELLAYESFMKFYQIPYIDGQSAAASANPAQELATSIQLWSFDDVSPANRPMPL

SEQ ID NO: 449 - protein, 462 aa, Zea mays
  misc_feature (190)..(190): Xaa can be any naturally occurring amino acid
SSRAARGPRCRIVRDVRESFGSLSRRSLEVRISGLPGLSGGHHRGKSVGSVSDLRDRPVVVDQSRWVGLPPELLRDVMRRLEEGESNWPSRKNVVACAAVCGTWREICKDIVLSPEFCGKLTFPVSLKQPGPRNGIIQCFIKRDKSTSTYYLYLCLSPVVLSEDGKFLLAAKRNRRTTYTEYIISVDPKXISRSSDGCVGKMRSNFLGTKFIVHDTRAPHNAGSLVSCERGSRRISSRRVSPKVPTASYPIARVNYELNLLGTRGPRRMNCTMHSIPASTLDPQGMVPEPGQPKQIFVPGSSSFEDSFRSANNTPSSSRFSVADRSLDWSSSRFSETSGLAQQDDNDSDQAKERPLVLCNKEPRWHEQLQCWCLNFHGRVTVASVKNFQLIAAPQLDSEPSQQAQQQTQPSNSSSASDHDKVILQFGKVANDMFTMDYRYPLSAFQAFAICLTSFDSKLACE

SEQ ID NO: 450 - protein, 197 aa, Brassica oleracea var. capitata
MGRKKLEIKRIENKSSRQVTFSKRRNGLIEKARQLSVLCDASVALLVVSASGKLYNFSAGDDLVKVIDRYGEQHADDDRKALDLQSEAPKYGSHHELLELVESKLVESNSDVSVDSLVQLENHLETALSVTRARKTELLLKLVDSLKEKEKLLKEENQGLASQMEKNNLAGAEADKMEVSPGQISDINCPVTLPLLY

SEQ ID NO: 451 - protein, 332 aa, Arabidopsis thaliana
MEAEEGHQRDRLCDYCDSSVALVYCKADSAKLCLACDKQVHVANQLFAKHFRSLLCDSCNESPSSLFCETERSVLCQNCDWQHHTASSSLHSRRPFEGFTGCPSVPELLAIVGLDDLTLDSGLLWESPEIVSLNDLIVSGGSGTHNFRATDVPPLPKNRHATCGKYKDEMIRQLRGLSRSEPGCLKFETPDAEIDAGFQFLAPDLFSTCELESGLKWFDQQDHEDFPYCSLLKNLSESDEKPENVDRESSVMVPVSGCLNRCEEETVMVPVITSTRSMTHEINSLERNSALSRYKEKKKSRRYEKHIRYESRKVRAESRTRIRGRFAKAADP

SEQ ID NO: 452 - protein, 267 aa, Oryza sativa
MEWDKAKASSGEAVDDRGGGEGGLGYVKVMTDEQMEVLRKQISIYATICEQLVEMHRALTAQQDSIAGMRLGNLYCDPLMVPGGHKITARQRWTPTPMQLQILENIFDQGNGTPSKQKIKDITAELSQHGQISETNVYNWFQNRRARSKRKQAALPNNNAESEAEADEESPTDKKPKSDRPLHQNIAMRDHNSERISEMHHFDTEHEQIRRMMYASNDSSSRSSGSLGQMSFYDNVMSNPRIDHFLGKVESPGSFPHMRSGESFDMY

SEQ ID NO: 453 - protein, 176 aa, Ashbya gossypii ATCC 10895
MDANSDQRDKHNQYIAELREQDRWLPINNVARLMKNTLPVTTKVSKDAKECMQECVSEFISFVTSEASDRCASDKRKTINGEDVLISLHALGFENYAEVLKIYLAKYRQQQALKNQMIFQRREDGADGLDGAADDGSDDAGEEEGEHGAGAAAGAPGAGALPEQDQFINQDGSLYI

SEQ ID NO: 454 - protein, 431 aa, Arabidopsis thaliana
MAFHHNHLSQDLSFNHFTDQHQPPPPQPPPPPPQQQQHFQEAPPPNWLNTALLRSSDNNNNFLNLHTATANTTTASSSDSPSSAAAAAAANQWLSLSSSFLQRNNNNNASIVGDGIDDVTGGADTMIQGEMKTGGGENKNDGGGATAADGVVSWQNARHKAEILSHPLYEQLLSAHVACLRIATPVDQLPRIDAQLAQSQHVVAKYSALGAAAQGLVGDDKELDQFMTHYVLLLCSFKEQLQQHVRVHAMEAVMACWEIEQSLQSLTGVSPGEGMGATMSDDEDEQVESDANMFDGGLDVLGFGPLIPTESERSLMERVRQELKHELKQGYKEKIVDIREEILRKRRAGKLPGDTTSVLKAWWQSHSKWPYPTEEDKARLVQETGLQLKQINNWFINQRKRNWHSNPSSSTVLKNKRKSNAGDNSGRERFA

SEQ ID NO: 455 - protein, 210 aa, Triticum aestivum
  misc_feature (17)..(17): Xaa can be any naturally occurring amino acid
  misc_feature (178)..(178): Xaa can be any naturally occurring amino acid
SRNGPAAAPAAKRRTRXSEVHNQSERKRRDRINEKMKALQELVPHCNKSDKASILDEAIEYLKSLQLQVQIMWMTTGMAPMMYPGAHQLMPPMAMGLNAACMPATQSLSQLQRIAPFMNHHLPNQMPRVQSPAIDSLNVANQMQNNGVCGEPRNPFLHPDDTLTAASQLPDMFPYASXKAQQNQNHQLLPNTDMPASGPCPPSFADGTGT

SEQ ID NO: 456 - protein, 283 aa, Arabidopsis thaliana
MGASVGGDGDAAVVAEQNRQLKGEIATHPMYEQLLAAHVACLRVATPIDQLPIIEAQLSQSHHLLRSYASTAVGYHHDRHELDNFLAQYVMVLCSFKEQLQQHVRVHAVEAVMACREIENNLHSLTGATLGEGSGATMSEDEDDLPMDFSSDNSGVDFSGGHDMTGFGPLLPTESEKSLMERVRQELKLELKQGFKSRIEDVREEIMRKRRAGKLPGDTTTVLKNWWQQHCKWPYPTEDDKAKLVEETGLQLKQINNWFINQRKRNWHNNSHSLTSLKSKRKH

SEQ ID NO: 457 - protein, 345 aa, Solanum tuberosum
MDDEMYGFHSTRDDYADKALMSPENLMMQTEYNNFHNYTNSSILTSNPMMFGSDDIQLSSEQTNSFSTMTLQNNDNIYQIRSGNCGGGSGSGGSSKDHNDNNNNNEDYDEDGSNVIKAKIVSHPYYPKLLNAYIDCQKVGAPAGIVNLLEEIRQQTDFRKPNATSICIGADPELDEFMETYCDILLKYKSDLSRPFDEATTFLNKIEMQLGNLCKDDGGVSSDEELSCGEADASMRSEDNELKDRLLRKFGSHLSSLKLEFSKKKKKGKLPKEARQMLLAWWDDHFRWPYPTEADKNSLAESTGLDPKQINNWFINQRKRHWKPSENMQLAVMDNLSSQFFSSDD

SEQ ID NO: 458 - protein, 415 aa, Arabidopsis thaliana
MISQREEREEKKQRVMGDKKLISSSSSSSVYDTRINHHLHHPPSSSDEISQFLRHIFDRSSPLPSYYSPATTTTTASLIGVHGSGDPHADNSRSLVSHHPPSDSVLMSKRVGDFSEVLIGGGSGSAAACFGFSGGGNNNNVQGNSSGTRVSSSSVGASGNETDEYDCESEEGGEAVVDEAPSSKSGPSSRSSSKRCRAAEVHNLSEKRRRSRINEKMKALQSLIPNSNKTDKASMLDEAIEYLKQLQLQVQMLTMRNGINLHPLCLPGTTLHPLQLSQIRPPEATNDPLLNHTNQFASTSNAPEMINTVASSYALEPSIRSHFGPFPLLTSPVEMSREGGLTHPRLNIGHSNANITDHLRIVFESLILDGFGYVNYPDKLLEKFSILQDGFGIFKVDHVLLVSLVLKLIIYNTIF

SEQ ID NO: 459 - protein, 325 aa, Oryza sativa
  misc_feature (280)..(280): Xaa can be any naturally occurring amino acid
MMDGRGSQEEEHLDLIMRHHASMGLDRCESEEALGSSESEQPTRPARPRGKRSRAAEVHNLSEKRRRSRINEKMKALQSLIPNSSKTDKASMLDDAIEYLKQLQLQVQMLSMRNGLYLPPVNLSGAPEHLPIPQMSAALDQNSAKASDPSVVLQPVNQTSGALLPFELASQHKPLFLPGVPNATALEPRFLVESSRSNLQSLRFTEPAEMIYPDEMMLKHRLTSASESTIVPGTDEKSVRQNTYMMNADRFDRYALSKDQLQHIMPKNTESVLDMPHLQXDYKLTIQLPILDRLQTKNPKVMAEGTCGVQTRSQLVTPRVRQHLI

SEQ ID NO: 460 - protein, 228 aa, Zea mays
MARGKVQLRRVENPVHRQVTFCKRRAGLLKKARELSVLCDASVGIIVFSAHGKLYDLATTGTMEELIERYKAASAGEATTDGCGRHNRMDPKHETTVLQQEINLLQKGLRYIYGNRANEHMNVDELNALERYLEIWMYNTRSAKMQIMAQEIQALKSKEGMLKAANEILQEKIVEQSSLLDVGMVVADQQNGRFSTVPLVEEVISSNPLTILSGYSSCRGSEMGYSFC

SEQ ID NO: 461 - protein, 364 aa, Zea mays
MASLCDFCGKQRSMIYCRSDAASLCLSCDRNVHSANALSRRHTRTLLCDRCGSQPASVRCLEDSASLCQNCDWNGHDAESGASGHKRQAINCYSGCPSSAELSRIWSFITDIPTVAAEPNCEDGLSMMTIDDSDVTNHHGASDDKRLLEIANTALMSDPPSPDKLKPLIGSSSGDGFDVLPLATDQPAGPVSATPKVPYARDDNKFNDGMYEDLCVDDADLTFENYEELFGTSHIRIEELFDDAGIDSYFEMKETPPFDFNEQPKIVQLQCSDVVPADCAMSNPGERADSSLCIPVRQVRSSISHPLSGLTGESSAGDHQDCGVSPILLMGEPPWHSPGPEGSLAGGSRDSALTRYKEKKKRRM

SEQ ID NO: 462 - protein, 151 aa, Brassica napus
  misc_feature (20)..(20): Xaa can be any naturally occurring amino acid
GTMDGIIDKYMKCTGGGRGXSSAIFTAQEQLQPPNLEPKDEVNVLKREIEMLQKGIRYMFGGGDGAMNLEELLLLEKHLEFWISQIRSAKMEIMLQEIQSLRNKEGVLKNANKFLLEKIEENNNSILDANFTTVDTNYSYPLTMPSEIFQF

SEQ ID NO: 463 - protein, 457 aa, Arabidopsis thaliana
MEKSGFSPVGLRVLVVDDDPTWLKILEKMLKKCSYEVTTCGLAREALRLLRERKDGYDIVISDVNMPDMDGFKLLEHVGLELDLPVIMMSVDGETSRVMKGVQHGACDYLLKPIRMKELKIIWQHVLRKKLQEVRDIEGCGYEGGADWITRYDEAHFLGGGEDVSFGKKRKDFDFEKKLLQDESDPSSSSSKKARVVWSFELHHKFVNAVNQIGCDHKAGPKKILDLMNVPWLTRENVASHLQKYRLYLSRLEKGKELKCYSGGVKNADSSPKDVEVNSGYQSPGRSSYVFSGGNSLIQKATEIDPKPLASASLSDLNTDVIMPPKTKKTRIGFDPPISSSAFDSLLPWNDVPEVLESKPVLYENSFLQQQPLPSQSSYVANSAPSLMEEEMKPPYETPAGGSSVNADEFLMPQDKIPTVTLQDLDPSAMKLQEFNTEAILKKLELGNFQNHIILFL

SEQ ID NO: 464 - protein, 262 aa, Capsicum annuum
MNTAIIAKSSGVRKGAWTEEEDFLLRKCIQNYGEGKWHLVPIRAGLNRCRKSCRLRWLNYLRPHIKRGDFGWDEIDLILRLHKLLGNRWSLIAGRLPGRTANDVKNYWNSHLQKKLITAPHRQEKKYNTALKITTKNVLRPRPRTFSSSAKNNISWCTNKSTVITNTLDKDERDKEIGLNICQKLTSETSSTIDDGVQWWTSLLENCKEIEEDVAAVGIFEEKNKLVPSLLHDEINSLTMQQGQSDGWDDFSADIDLWNLLN

SEQ ID NO: 465 - protein, 437 aa, Escherichia coli
MTHDNIDILVVDDDISHCTILQALLRGWGYNVALANSGRQALEQVREQVFDLVLCDVRMAEMDGIATLKEIKALNPAIPVLIMTAYSSVETAVEALKTGALDYLIKPLDFDNLQATWKKRSHTHSIDAETPAVTASQFGMVGKSPAMQHLLSEIALVAPCEATVLIHGDSARKELVARGLHASSARSEKPLVTLNCAALNESLLESELFGHEKGAFTGADKRREGPFVEADGGTCLDEIGDISPMMQVRLLRAIQEREVQRVGSNQIISVDVRLIAATHRDLAAEVNAGRFRQDLYYRLNVVAIEVPSLRQRREDIPLLAGHFLQRFAERNRRGKRFYAPGLDLLIHYDWPGNIRELENAVERAVVLLTGEYISERELPLGIASTPIPLGQSQDIQPLVEVEKEVILAALEKTGGNKTEAARQLGITRKTLLAKLSR

SEQ ID NO: 466 - protein, 286 aa, Dendrobium grex Madame Thong-In
MDEMYSIPPDSTFAAADDLHGLIAASGYGAAAAAAAAEEEMKARIASHPRYPHLLEAYIDCQKVGAPPDIASLLEEIRRENAGGERLASSSVILGSDPELDEFMEMYCDVLVKYRRDLERPFDEATAFLNTMEVQLSDLCKPTCRAALGPYVSDEAVGSSDEELSGGEGEAPESHLKGEERDLKEKLLRKYSGYLSSLKQEFSKKKKKGKLPKEARQILFEWWTAHYKWPYPTEADKIALAEATGLDQKQINNWFINQRKRHWKPAENMHFSVMDNSSTSSLFADD

SEQ ID NO: 467 - protein, 590 aa, Vitis vinifera
MKREYHHPHHPTCSTSPTGKGKMWDADPQQDAGMDELLAVLGYNVKASDMAEVAQKLEQLEEVIVNAQEDGLSHLASETVHYNPSDLSNWLGSMLSEFNPTPNCALDNPFLPPISPLDYTNCSTQPKQEPSIFDSPSLDYDLKAIPGKALYSHIEQPPQQPPAPPLYQRDNKRLKPTTSATANSVSSVIGGWGVPTESARPVVLVDSQETGIRLVHTLMACAEAVQQENLKLAEALVKQIGFLAVSQAGAMRKVATYFAEGLARRIYRLYPDKPLDSSFSDILQMHFYETCPYLKFAHFTANQAILEAFEGKKRVHVIDFSMKQGMQWPALMQALALRPGGPPSFRLTGIGPPSTDNTDHLHEVGWKLAQLAETIHVEFEYRGFVANSLADLDASMLELRDGESVAVNSVFELHSLLARPGGIERVLSAVKDMKPDIVTIVEQEANHNGPVFLDRFTESLHYYSTLFDSLEGCGVSPVNTQDKLMSEVYLGQQICNVVACEGPERVERHETLAQWRARLGSAGFDPVNLGSNAFKQASMLLALFAGGDGYRVEENNGCLMLGWHTRPLIATSAWQLANKPALPSSTPASN

SEQ ID NO: 468 - protein, 87 aa, Brassica napus
MDTNTSGDELLTKARKPYTITKQRERWTEDEHDRFLEALRLYGRAWQRIEEHIGTKTAVQIRSHAQKFFTKLEKEAEAKGIPVCQAL

SEQ ID NO: 469 - protein, 229 aa, Glycine max
MEKVSFVKNGELRLPPGFRFHPTDEELVLQYLKRKVFSCPLPASIIPEVDVCKSDPWDLPGDLEQERYFFSTKEAKYPNGNRSNRATNSGYWKATGLDKQIVTSKGNQVVGMKKTLVFYRGKPPHGSRTDWIMHEYRLNILNASQSHVPMENWVLCRIFLKKRSGAKNGEESNKVRNSKVVFYDFLAQNKTDSSSSAASGITHEHESDEHDHEESSSSNTFPYTIRTKP

SEQ ID NO: 470 - protein, 644 aa, Nicotiana tabacum
MEAIFQEQLFPGADAFIFRHPSSILVDPREDHVVQNGTIVNRHSFEDYSHVHSNVSDPIVRDGDSSPKEEGEGEGDHSDAMYKYISQMLMEEEDLEYKPCMFHDCMALQAAEKYFSDVLHGSDNITNSPQFSAIIPQDKVSSSCPDFSNTSSDSIESLQWDLNFESPVSVKSLSGSLLTSFRSPSGLREKKNHHRQDDDQQRSNKQLATFAADESEPLEMYDNVLLLCPNNPCVLPNEVKKPIKVGRPRSGGKKHSSSKKEIVDLRGLLTQCAQAMSSYDTRTANELLMRIRQHSSSHGDGTERLAHYLANALEARLSSTGTASYTVFASSRISAAHILKAYKAFITACPFKLMSNIFANKYIKKLITGGAPRTIHIIDFGILYGFQWPCLIQSLSALRRGEPIKLRITGVELPQPGFRPAERVEDTGRRLKKYCDRFHVPFEFNAIAKKWESITLEELAIDRDEVLVVNSLYRLGNIPDETVVPTSPRDVVLDLIRRIRPDMFIHGVVNGTYNTPFFLTRFREALFHFSTLFDMFEATMPREDEDRKLFEEEVFARDAMNVIACEGTERVERPETYKQWQLRCARAGFKQLPLDQEIVNFVSNKVRREYHKDFSVDEDSQWMLQGWKGRVVYALSCWKPAEQL

SEQ ID NO: 471 - protein, 303 aa, Arabidopsis thaliana
MEKMIEPRDNTRESEDEDALKLPGFRFHPTDEELVGYYLSKKVLLKKTSKIDEIVSQIDIYKFDPWDLPRSRNTEKESYFFCKRGRKYRNSIRPNRVTGSGFWKATGIDKPVYSDGSNKAVIGLKKTLVYYLGSAGKGNKTDWMMHEFRLPTANDTIPGGPTHSNPTPTSLLHAEVWTLCRIFKRTVSSRKYTPDWRELANGKRVKQQQSNYQEAYINFGDNESSSSTNVMNVREGKGNYERSVFQLQQTPYQHQNQPILMDTTHVDSFQHFSNDNIHHETYETWPDELRSVVEFAFPPSFLS

SEQ ID NO: 472 - protein, 199 aa, Ceratopteris pteridoides
RNGLLKKAHELSVLCDAEIALIIFSSTGKLFEHSSSRGIKKILERYKRCSGILQDVGGTVIRDVEYWKQEAERLKERLTYMEEIQRNMLGESLGSLQIKDLQNLEAKLDSGLYKIRGAKTQLMVRQVQELQKKEQILLQQNEALRTKLAELSRLQAPVSGLTTATTSQDVQESSSGSGSRQHETSLSAAETTLQLGFAQ

SEQ ID NO: 473 - protein, 357 aa, Glycine max
MDGREGMAFPGGSVPYYMQHRGGGVSGSGPGTGTQSGGFQPPSGFRALSNVSPGSAFKVESHSYSHSQSQPQHASFSHGINIGSSPDGGGGGPSSGEPVKKKRGRPRKYGPDGSVSLMLSPMSATASSTPGSGTSSEKRPRGRPPGSGRKQQLATLREWMNSSAGLAFSPHVITVGVDEDIVAKLLSLSQQRSRALCIMSGTGTVSSVTLRQPASTNASVTFEGRSQILCLSGSYLVAEDGGPSNRTGGISVSLSSHDGHVIGGGVAVLIAGGPVQVMLCSFVYGGSKTKSKLGTTIKDESSEPPPQHNDKLASPASAPAPPGQNYLPLSATNLWPGSRPAELKSTHMHTGIDLTRG

SEQ ID NO: 474 - protein, 475 aa, Kluyveromyces lactis NRRL Y-1140
MDDLGEQLSEGHKDDYDNGIGSVPGGSGSNGKGKSQRTSFNDFVRKLFLILESEEYTSIISWSPDGKNFIVLDTNKFTTDILPKHFKHSNFASFVRQLNKYDFHKVKRKKNEVSEGIQNAWEFNHQYFRRHDEAGLDNIRRKPSSQKKILVDENSVIVRKLGGAPGDDGAFIAGDEEGMTAKMLLKNTVNKTKFNQLKRKVEDMENQVQYLTNENHNMKLDLQKIQSKYNMALESLLSTESFNSQLISNFQILVDALSQQGLKVPVGLSFEKGNSRADNKSHQQRQISDSTGSTPNANIPGLSVNTTLQKQEPIELLPMDQHPVLRPGFHVLLVEDDSVCIQLCSKFLRKYGCSVEVVTDGLSAISTLEKQRFDLVLMDIVMPNLDGATATSIVRSFDNETPIIAMTGNIDDQDLVTYLQHGMNDILAKPFTKDDLHSMLIRYLKDRIPLSEQRQNSNNDPKAYVEEPMLKKPHI

SEQ ID NO: 475 - protein, 273 aa, Triticum aestivum
  misc_feature (174)..(174): Xaa can be any naturally occurring amino acid
  misc_feature (176)..(176): Xaa can be any naturally occurring amino acid
  misc_feature (196)..(196): Xaa can be any naturally occurring amino acid
MLLLNPASEAAAAAALDSIRQQLLEEPARPAYCRSASFGSLVADQWSESLPFRPNDADDMVVYGALRDAFSCGWLPDGSFAAVKPEPLPSPGSYDGSCLGSFLASPPELDAPWTEEEAEVAATASRGKHFRGVRQRPWGKFAAEIRDPAKNGARVWLGTFDSAEDAAVAYDRAXYXMRGSRALLNFPLRIGSRDRXAAAAAGQKRPSPQPASPDSSSPSCSAPGSSKRRKRGEAAAASMAMALVPPPPAQAPVQLTLPAQPWLAAGAVQQLVS

SEQ ID NO: 476 - protein, 298 aa, Solanum tuberosum
MCGGAILYDIIPRDRRLSSTDLWPSSADFWQTSSFSKPISTQNVPPKPKRAQLSRGSEQMKKRQRKNLYRGIRQRPWGKWAAEIRDPRKRVRVWLGTFNTAEAARAYDREARKIRGKKAKVNFPNEDDDHYYSHPEPPPLNIVYESYDTTSTYNQESNNCYPFHSIENTEPVMEFAIANKNSSGSAYNGIEDQNVEGEEQTVKNSNNRIVEEEEKTEDEVQILSDELMAYESLMKFYEIPYVDGQSVAATVNPAADTEVGGGSMELWSFDDVSRLQPSYNVSLIIVLFKLLHLFSLLN

SEQ ID NO: 477 - protein, 302 aa, Triticum aestivum
MNQFVPADWTGNMGDALPPLSGEDDGLVELLWCSGHVVMQSQAPPRPAVPEQEAAPWFQYPVVDEDDYSVERDLFSEIFGGVPADGAGRPCKEEDKERGAADAVTALRSGVMPPPLLTDKAGLHGDGPRDSLASEAGESSVVTMVSRRVCGGSNQAQTAHVSDAAGDDSVPLPLIRNRKEARDSRSYHSASATLTSSSTWSRPSGTSKRKQSEGPSEVMQDVESNSADVTCETAQKPTTAKRRRAAQVHNLSERRRRDRINEKMRALQELVPHCNKTDKASMLDEAIEYLKSLQLQLQLMWA

SEQ ID NO: 478 - protein, 327 aa, Brassica oleracea
MTRRCSHCNHNGHNSRTCPSRGVMLFGVRLTGGSIRKSASMGNLLSHGHGSGSPGAVPDHVAGDGYTSEGFVAGSSSSRERKKGAIWTEEEHRMYLLGLEKLGKGDWRGISRKYVRTRTPTQVASHAQKHFMRLSDVSRRKRRSSLFDMIPHEGGDTPLDLQAPKAENTRVETKMQRGDSVHQKFARNSIHATPIFKIEESESMDSTNSTIKEPTPPTTQLRSQPQPQRPGSYPVLYPGYFSPYYPFPFPVWSAGYVLEPAKKEETHEILRPTAVHSKAPFNVNGLLGMTTKLSLGEPKENGESDQSLSLKLGGGSETRQSPLHPNA

SEQ ID NO: 479 - protein, 380 aa, Arabidopsis thaliana
MDSNNHLYDPNPTGSGLLRFRSAPSSVLAAFVDDDKIGFDSDRLLSRFVTSNGVNGDLGSPKFEDKSPVSLTNTSVSYAATLPPPPQLEPSSFLGLPPHYPRQSKGIMNSVGLDQFLGINNHHTKPVESNLLRQSSSPAGMFTNLSDQNELKHFGLNKSNKCLLYTYKFAGYGSMRNLMNYEEDEESPSNSNGLRRHCSLSSRPPSSLGMLSQIPEIAPETNFPYSHWNDPSSFIDNLSSLKREAEDDGKLFLGAQNGESGNRMQLLSHHLSLPKSSSTASDMVSVDKYLQLQDSVPCKIRAKRGCATHPRSIAERVRRTRISERMRKLQELVPNMDKQTNTSDMLDLAVDYIKDLQRQYKILNDNRANCKCMNKEKKSI

SEQ ID NO: 480 - protein, 239 aa, Glycine max
MVQSKKFRGVRQRHWGSWVSEIRHPLLKRRVWLGTFETAEEAARAYDQAAILMSGRNAKTNFPITQTPEGDPKSTTSEDTPSTTSKDLEEILHAKLRKCGKVPSPSMTCLRLDPENSHIGVWQKRAGRRSDSNWVMTVQLGKKSVNVNNNDTHHQADSSSSSSLSSSLPSSEHHHIESPSLAVTGNLHHQEVVRGEIDEEERIALQMIEELLNDRNCPSPSFNNNIQERDGADHDHFFL

SEQ ID NO: 481 - protein, 135 aa, Triticum aestivum
MGALCDYCGEHRSMVYCRSDAASLCLSCDRNVHSANALSRRHTRTLLCDRCASQPAMVRCLEENTSLCQNCDWNGHSAGSSAAGHKRQNINCYSGCPSSAELSRMWSFILDIPNVAPELNCEQVISMMSIRDSAV

SEQ ID NO: 482 - protein, 264 aa, Festuca arundinacea
MSRKKKVRRRSTGPDSVAEIIKKWKEQNQKLQEENGSRKAPAKGSKKGCMAGKGGPENSNCKYRGVRQRTWGKWVAEIREPNRGNRLWLGSFPTAVEAAHAYDEAARAMYGATARVNFSERSPDANSGCTSAPPVLMSNGPTAVSYPSDEKDESESPPSLMSDAPTATLHRSDAKDEPESAGTLVHEVKTEVSNDSRSIREERKTVEVFQPEGKALHKEEKVSYDYFNVEEVLDMIIVELSADRKMEVHEEYQDGDDGFSLFSY

SEQ ID NO: 483 - protein, 254 aa, Festuca arundinacea
MSRKKKVRRRSTGPDSVSEIIKKWKEQNQKLQEENGSRKAPAKGSKKGCMAGKGGPENSNCEYRGVRQRTWGKWVAEIREPNRGNRLWLGSFPTAVEAAHAYDEAARAMYGATARVNFSERSPDANSGCTSAPPALMSNGPTAVSHPADGKDKSESPPSLTSDAKDEPESAGTVVHEVKTEASNDSTSVREERKTVEVFQPEGKALRKEEKVSYDYFNVEEVLDMIIVELSADRKMEVHEEYQDGDDGFSLFSY

SEQ ID NO: 484 - protein, 693 aa, Cucumis melo
MMMMFNEMGFCDDMDFLSASIVEGDAVAPPTDPEVLVEDDYSDEEIDMDELERRMWRDKMRLKRLKEQSKVKEGIDIVKQRQSQDQARRKKMSRAHDGILKYMLKIMEVCNAQGFVYGIIPEKGKPVTGASDNLREWWKDKVRFDRNGPAAIAKYQADNAIPGRNDGCNSIGPTPHTLQELQDTTLGSLLSALMQHCDPPQRRFPLEKGVPPPWWPSGAEEWWPQLGLPKDQGPPPYKKPHDLKKAWKVGVLTAVIKHMSPDIAKIRKLVRQSKCLQDKMTAKESATWLAIINQEEILARELYPDSCPPLSSGGGSGSLVINDCSEYDVEGAEEEPSFDVQDRKPDNHSSFNLGMDRMRDRVSLRQPPYAMKGEVTTNLDFMRKGKPTSDLNMMMDQKIYTCEFLQCPYSELRLGFNDRTSRDNHQLTCPYRTSSEFSGSSFHVNEVKPVIFPQSFAPPKSMHPPSAQFRHFRLSTLGVPEDGQKLTSELMSIYDTNIQGNKNNLNTVNSATTENQNLPQLKIQPQQDDYFRNQGLMMEGNFFDGSNVSSSHQMFTRDEGQFDRFKPMNSPFENNHHHHNNNNNFHLMFSSPFDLSTFDYKEEVPSVQPSTHCRNSRIFHYGIIKPALTPMLYRRILSVKSISSNISCSSEIHSSSFYSLSISLSLSWGLPFAFTRNQSKLPFGVCLTWCYVI

SEQ ID NO: 485 - protein, 240 aa, Brassica oleracea
MYGQGEIMAATETEYAVLESIRRHLLGGETELQFSESIPSSCFTESWGDLPLKENDSEDMLVYGVLNDAFNRAACETSSPSSDLSCLSDFLDKPPANPSHNDFPAVKMEPAENLAAVAEKPKEVAPPAKGKHYRGVRQRPWGKFAAEIRDPAKFGARVWLGTFEKAEDAALAYDRAAFRMRGSRALLNFPWRVNSGEPDPVRIPSKRSYTSSSSSDNGTPKRRRNTEEVPSELQVKCEVA

SEQ ID NO: 486 - protein, 382 aa, Acetabularia acetabulum
MNDMDFAALFNQHEGNNPDNLQPNAPPYMLSPQQNAAATMPKSHCSGDNTLMLSDMGEQVIMHPLYPDLVKAIMDCRKVGGMDESRHHIQIRTEQVLEDLHRKREQYQITGRMPALDPELDQFLRQYIQVLDELHAELLNINREADNILHMFTTQIAEVINMPMDPRSMHARNAFNAQSNIDMTWFEIRNEQEQRVLLKQKYRQELLALKEEFSKRKKRGKLPTHSIEVLKSWWKEHIAWPYPTDSAKRSLASQTNLTSIQINNWFINQRKRHWHKLFPEGVPNSQEEALRSLKARGMLGMDSSGPMRLMSMDIESQETQEVEQETEDIQTPNEFQFQSAFLNEHEQMMDEAGFTSRPNVQLPDAISQFQSQLGQIRKDSDE

SEQ ID NO: 487 - protein, 615 aa, Cucumis melo
MNTMGIFEDISFCRNLEYFSAPPGEQETAQEHEAEAVLEEDYSDEELDVDELERRMWRDRMLLRRLKEQSKEKEGADSSKQRQSQEQARRKKMSRAQDGILKYMLKMMEVCKAQGFVYGIIPEKGKPVSGASDNLRAWWKEKVRFDRNGPAAIAKYEADHAIPGNNDECNTVASTPHTLQELQDTTLGSLLSALMQHCDPPQRRFPLEKGVSPPWWPTGNEEWWPELGLPKDQGPPPYKKPHDLKKAWKVSVLTAVIKHMSPDIAKIRKLVRQSKCLQDKMTAKESATWLAIVNQEEALARKLYPDKCPPVSICGSGSLLISDTSDYDVEGVEDEPNVEAEESKPHDLNFFNMGAPGSRERLMMPPVCPQIKEEFMENNSDFNQKRKQMTDESNTIMNPKMYTCEYSQCPYNSARLGFLDRNSRNNHQLNCPFRSDSSHIFSMPSFQSNEDKSASPIPPSFNHPKAPARLMNLTPPFRVSGLGLPEDGQKMISDLLSFYDSNLQQDKHLNSGNLDMQDDHNQQQQLPKFQLQVDDNLYCQATMVGNTMPIQQHPDFSSNKHPFDEYKAAFDSPFGMYPNDNISDFRFGSPFNLASIDYAAADTQLPKQDTPLWYL

SEQ ID NO: 488 - protein, 381 aa, Manihot esculenta
MCGGAIISDFIPATAAGRSSRRLTADFLWPDLKKPIGKIVGDLDDDFEADFQEFKDESDVDEEDDVLFDVKPFSFSATASPPPRNRSPSRGSTAVKSVEFNGLAEKSAKRKRKNQYRGIRQRPWGKWAAEIRDPRKGVRVWLGTFNTAEEAARAYDAEARRIRGKKAKVNFPDEAPRASPKRTMKANPQKPLPKRNATESMSYLNNPDQDYFNTLGSVDEKPLVSQFDLMDSFPANGDATVKSIPPCDNVPTFFNSDQGSNSFECSDFGWGEQASKTPEISSVLSATPEIDESLFMDDANPKKKMKSDSENAVPIEESNGKSLSEELLAFDNQMNFQMPYLEGSWEASLDGFLNGDVTQDGGNPMDLWSFDDLPNMVGGVY

SEQ ID NO: 489 - protein, 103 aa, Brassica napus
  misc_feature (30)..(30): Xaa can be any naturally occurring amino acid
TGFKEKIVDIREEILRKRRAGKLPGDTTSXLKAWWQSHSKWPYPTEEDKARLVQETGLQLKQINNWFINQRKRNWHSNPSSSTVLKNKRKNNAGDSSGRERFT

SEQ ID NO: 490 - protein, 381 aa, Medicago truncatula
MGRHSCCYKQKLRKGLWSPEEDEKLLNYITKHGHGCWSSVPKLAGLQRCGKSCRLRWINYLRPDLKRGAFSEQEENSIIELHALLGNRWSQIAAQLPGRTDNEIKNLWNSSLKKKLKQKGIDPNTHQPFSENNDNDTPNIQIQKTSVGSNEVKNLFDDTPNPNSIPMDNCNYPLEINSKINNSVNCFIPCDNMVGLGGGSYLNFQQLNYGINNMTLSPPNSNSNTSLCFIPSTSGSTSTCSQMMSELNSSTMFHSMYTNHPSNSISSGEVDGIQNWEFGASKSSNGSSINNYLDHQVVEDIKWSDYINSTPFFLGNNNTFQQTTTSTHSSIYEVKQEMGGFINTNESIQSSSSTWHPHFEADIYSNKDLQRFSLAFGQTLN

SEQ ID NO: 491 - protein, 689 aa, Medicago truncatula
MSKEKVDHKEMNNSCAPDQSSVPRNDLFELVWQNDQILVHGQSSNSNRAKMTPTLPSHTLKGHDKYSGQHANETNTRIGKFEDLDNGLNEIITRSVSSSQDEDLMTMMPWLNCAMDDEHSLHYSSCFVHEPGARTNDFAATNKFSLLDRKSNCIQVFSDSHKQGILSKGSSLAVEDFDTSELKTSTNQLNMSSLLQQCQPSFESIRFRESGLSENNTKGNANQHAPCEEISHVPSSSTVMNFTHFAKPAAIVKANLQNIGFSSSRSERVGAKNKDAAAIGRNPCESSKVDLSVECPKSSAIHCHQSVEPSRVGLKPLEPKSLEKNTTVSTSACKEDVSKVDQTSNQVLSESSRKGQEVFKKCTELTVASSSVCSDNGVHRSSDDANQNLKRKNLDSEDSEWHSEDFEDESIGVKRTDHGRGVTGSKKNRSTEVHNLSERRRRDRINERMRALQELIPNCNKVDLFFLQADKASMLDEAIEYLKSLQLQLQIMSMGGGGLYMPMTLPAGMQHMHAAHMFPFSPMSVAMQMGLGVPQFQGTHLPVAHTSGLAALHGMVRPNPQMFGLQAGQGLHMPMPSASMFSYPGEPVMNSSAVELNASGTAGLMETVESASASKLKDQMPKLKDPMPNVNSQVMLNNKGCSSTNQMSIQCEATTGGLEQSNVVLDSAHALLENDKRDNIEIEIDKSHE

SEQ ID NO: 492 - protein, 428 aa, Triticum aestivum
  misc_feature (204)..(204): Xaa can be any naturally occurring amino acid
MLHQTLTPSSLAFSASASPDPLPFASNASPAAAAAAAATTLRPSAMPSYAHHHSSLDERMDALKGSSRQEETPDEAAAAAEAPAAWGFAERDGFSVEDLLDLEEFCEPDKDGADEPEEAPAADVKEEKLNDGPNQPVVSYELAPPAPPAPEIVDLPAHDVEEELEWVSRIMDDSLSELPPQPAPPASMMASLAPRPPQHRLPAXQRHPQDGAYRALPSMSDPMRTPTICALSTEALVPVKAKRSKRSRASGWSLSGPAPDSTSSSSTTTTSSCSSSASFSPYFLLDTPHFGASELMEEYNILPPPPKKSKHGKSSKQKAKKRGRKPKNLPAPSSAMEAATQSDRRCSHCGVQKTPQWRAGPEGAKTLCNACGVRYKSGRLLPEYRPACSPTYVSSVHSNSHRKVLEMRRKKEDGPLTVTATAPAVASF

SEQ ID NO: 493 - protein, 375 aa, Oryza sativa
MEEEKRLERIIKEIDSPISPGGGAALLAEDDDLVFPGFRFHPTDQELVGFYLTRKVEKKPFSIDIIKEIDIYKHDPWDLPKVSHGAVALQGSSSSSSLSTAAAAEKECGYFFCLRGRKYRNSIRPNRVTGSGFWKATGIDKPIYSSSLAAAAAAAGAGDCIGLKKSLVYYRGSAGKGTKTDWMMHEFRLPSSISDSDHLQDASETWTICRIFKRSMTYTKGRAAAAAASMNKRISHELQHIHHHQQQQFYYHEVVHDGHGHHHRRHLQHYAGSASMAAAAANIVDVIDHSSDAETTTRSHSHSQSHLVADIRHRQSPFMLDFHAGTASSSSSTAAGWSEVMSFSRDGGSSSGSSWDELGRIMDISTNSANNNYYL

SEQ ID NO: 494 - protein, 222 aa, Oryza sativa (japonica cultivar-group)
MARGKVQLRRIENPVHRQVTFCKRRAGLLKKARELSILCEADIGIIIFSAHGKLYDLATTGTMEELIERYKSASGEQANACGDQRMDPKQEAMVLKQEINLLQKGLRYIYGNRANEHMTVEELNALERYLEIWMYNIRSAKMQIMIQEIQALKSKEGMLKAANEILQEKIVEQNGLIDVGMMVADQQNGHFSTVPLLEEITNPLTILSGYSTCRGSEMGYSF

SEQ ID NO: 495 - protein, 584 aa, Arabidopsis thaliana
MMMFNEMGMYGNMDFFSSSTSLDVCPLPQAEQEPVVEDVDYTDDEMDVDELEKRMWRDKMRLKRLKEQQSKCKGGVDGSKQRQSQEQARRKKMSRAQDGILKYMLKMMEVCKAQGFVYGIIPEKGKPVTGASDNLREWWKDKVRFDRNGPAAIAKYQSENNISGGSNDCNSLVGPTPHTLQELQDTTLGSLLSALMQHCDPPQRRFPLEKGVSPPWWPNGNEEWWPQLGLPNEQGPPPYKKPHDLKKAWKVGVLTAVIKHMSPDIAKIRKLVRQSKCLQDKMTAKESATWLAIINQEEVVARELYPESCPPLSSSSSLGSGSLLINDCSEYDVEGFEKEQHGFDVEERKPEIVMMHPLASFGVAKMQHFPIKEEVATTVNLEFTRKRKQNNDMNVMVMDRSAGYTCENGQCPHSKMNLGFQDRSSRDNHQMVCPYRDNRLAYGASKFHMGGMKLVVPQQPVQPIDLSGVGVPENGQKMITELMAMYDRNVQSNQTPPTLMENQSMVIDAKAAQNQQLNFNSGNQMFMQQGTNNGVNNRFQMVFDSTPFDMAAFDYRDDWQTGAMEGMGKQQQQQQQQQDVSIWF

SEQ ID NO: 496 - protein, 268 aa, Gossypium raimondii
GAWTKEEDQRLINYIRVHGEGCWRSLPKAAGLLRCGKSCRLRWINYLRPDLKRGNFTEEEDELIIKLHSLLGNKWSLIAGRLPGRTDNEIKNYWNTHIKRKLISRGIDPQTHRPLNQTANTNTVTAPTELDFRNMPTSVSKSSSIKNPSLDFNYNEFQFKSNTDSLEEPNCTASSGMTTDEEQQEQLHKQQQYDPSNGQDLNLELSIGIVSADSSRVSSANSAESKPKVDNNNFQFLEQAMVAKAVCLCWQLGFGTSEICRNCQNSNS

SEQ ID NO: 497 - protein, 265 aa, Gossypium herbaceum
TKEEDQRLINYIRVHGEGCWRSLPKAAGLLRCGKSCRLRWINYLRPDLKRGNFTEEEDELIIKLHSLLGNKWSLIAGRLPGRTDNEIKNYWNTHIKRKLISRGIDPQTHRPLNQTANTNTVTAPTELDFRNSPTSVSKSSSIKNPSLDFNYNEFQFKSNTDSLEEPNCTASSGMTTDEEQQEQLHKKQQYGPSNGQDINLELSIGIVSADSSRVSSANSAESKPKVDNNNFQFLEQAMVAKAVCLCWQLGFGTSEICRNCQNSNS

SEQ ID NO: 498 - protein, 126 aa, Oryza australiensis
MSERRRREKLNEMFLILKSVVPSIHKVDKASILAETIAYLKELEKRVEELESSNQPSPCPLETRRRKSREITGKKVSAVAKRKASTPEVASDDDTDGVHHCVSNVNVTIMDNEVLLELQCQWKELL

SEQ ID NO: 499 - protein, 263 aa, Gossypioides kirkii
AWTKEEDQRLIDYIRVHGEGCWRSLPKAAGLLRCGKSCRLRWINYLRPDLKRGNFTEEEDELIIKLHSLLGNKWSLIAGRLPGRTDNEIKNYWNTHIKRKLISRGIDPQTHRPLNQTANTNTVTAPTELDFRNTPTSVSKSSSIKNPNFNYNEFQFKSNTDSLEEPNCTASSGMTTDEEQQEQLHKKQQHDPCNGQDLNLELSIGIVSADSSRVSSANSAESKPKLDNNNFQFLEQAMVAKAVCLCWQLGFRTSEICRNCQNS

SEQ ID NO: 500 - protein, 341 aa, Tripsacum cundinamarce
PSVKHMFPFCDSSSPMDLPLYQQLQLSPSSPKTDQSSSFYCYPCSPPFAAADASFHLSYQIGSAADATPPQAVINSPDLPVQALMEHAPAPATELGACASGAEGAGGSLDRAAAAARKDRHSKICTAGGMRDRRMRLSLDVARKFFALQDMLGFDKASKTVQWLLNTSKAAIQEIMADDASSECVEDGSSSLSVDGKHNPAEQLGGGDQKPKGNCRSEGKKPAKASKAGKSANNAHPVPDKETRAKARERARERTKEKHRMRWVKLASAIDVEAAAASVPSDRPSSNNLSHHSSLSMNMPCAAAELEPEERERCSSALNTRGRMQEITGPSDVVLGFGNGG

SEQ ID NO: 501 - protein, 358 aa, Andropogon gerardii
PSVKHMFPFCDSSSPMDLPLYQQLQLSPLSPKPDQSSSFNCYPCSPLFAAAAADASFHLTYQIGSAAATTPPQAVIDSPELPVQPLMEQAPAPATEQGACNSGAQGAGVSVSLERAAAAARKDRHSKICTAGGMRDRRMRLSLDVARKFFALQDMLGFDKASKTVQWLLHTSKAAIQEIMADDVDASSECVEDGSSSLSVDGKHNPAEQLGGGDQKPKGNGRSEGKKPTKSRKAATTPKPPRKSSNNAHPVPDKETRAKARERARERTKEKHRMRWVKLASAIDVEAAAASVASDRPSSNHLNHHHHHSSSSSMNMPRAAAAESEERERCSSALNNRGRMQEITGASDVVLGCFGNGG

SEQ ID NO: 502 - protein, 282 aa, Mesembryanthemum crystallinum
MSLIANFESDFAVLESIRRHLLEDWDPRAGAPAITTGSGPVYHRNSSFSSLYPCLTDNWGELPLKEDDSEDMVLFGVLRDAVHTGWSPQSGSESGSGSPAPVTVKPEPVDSPVSSPAPVRVAGGEAPVAAAPARGKHYRGVRRRPWGKFAAEIRDPAKNGARVWLGTFETAEDAALAYDRAAFRMRGSKALLNFPLRVNSGEPDPVRITSKRSSPERSVSSSSSESASPKRRKKEEVVVGPVAGQARPGLQQVGNVVEGMQVGVGCQVGVGTMPLGDQLLVT

SEQ ID NO: 503 - protein, 206 aa, Glycine max
HASEQVEDDDDSWEVRAFAEDTRNIMGTTWPPRSYTCTFCRREFRSAQALGGHMNVHRRDRARLHQAPVPSSSSNPMTSSLPTSPFINIPPQDLVANAGLCLLYHLPKSPSSTAPPFPPSPTTPSPSTLLSISSYPTTNFLMQTSFNFPGAPATGINTTTTTTVSSLCYNSSKVEQSATSSSIDHNGHLEELDLELRLGHKPTPTS

SEQ ID NO: 504 - protein, 409 aa, Oryza sativa
MAGGGGSLAVGGGLNGWRGVSGSVGAAGLEEGSGPAWWRGHLTANGSRMKKGGGSRRHAIPTGEAGSGAVSRVAVAVAVYVDSSIEQEQLEEVVPWWGLMGRPPCCVKAEVKKGPWTPEEDLMLVAYVQEHGPGNWRAVPTNTGLMRCSKSCRLRWTNYLRPGIKRGNFTDQEEKLIVHLQALLGNRWAAIASYLPERTDNDIKNYWNTHLKKKLKKMSATGGGGDDGEGGGAGEVKTRAAAPKGQWERRLQTDIHTARQALRDALSLDPSPPAKPLDSSSGATAPPSSQAATSYASSAENIARLLEGWMRPGGGGGKTTTTPSSGSRSSAASVLSGEASHSGGATAPTPDGSTVTSKTKDEETAGAPPPPPPPAFSMLESWLLDDGMGHGEVGLMDVVVPLGDPSEFF

SEQ ID NO: 505 - protein, 344 aa, Medicago truncatula
MEHNNNNNNMSSSQDEISLFLHQILLRSSSSSSMPGSINQLQDGKISALDSTSRSNHAINVTSSSVGAGGGLSGNDTDEYDCESEEGVEALIEEVPTKSVGASRSSSKRSRAAEVHNLSEKRRRSRINEKMKALQNLIPNSNKTDKASMLDEAIEYLKQLQLQVQMLSLRNGLSLHPMYFHEGLHSLPLSRMSTELSEGNGSNPLNMTSTLPHPQDNPLLYPSNLPNKNTLPSQPSMSSYPSYINDTETSFGVESGIPAQKERLQRSSEPMHGEDLLQHQQLNAINSFTNLLGGSQVVKEFQSGAMATSTTNNTLQTCVAGRDQSGVVMRNSEPNIIFTSQLSR

SEQ ID NO: 506 - protein, 266 aa, Brassica napus
  misc_feature (139)..(139): Xaa can be any naturally occurring amino acid
  misc_feature (154)..(154): Xaa can be any naturally occurring amino acid
  misc_feature (200)..(200): Xaa can be any naturally occurring amino acid
MAPSAASAASFFPVQLAALSLLLPPSSFAAAPPLPTRHLPPPSQLPPVAPPRFSRRSRPRTPNSDAEVIALSPKTLMATNRFICEVCNKGFQREQNLQLHRRGHNLPWKLKQKSTKEVKRKVYLCPEPTCVHHDPSRAXLGDSTGTPKLLSGTXAEKKWKCTECSKRYAWQSDWKAHSKTGHSDWNRRSKTCGTTRVDSXLTHRAFCDAIVTLRARALPSLTSLKSHHFTYGQNTNNPNNTSSMILGLSHMGPSQNLDHESGDRLR

SEQ ID NO: 507 - protein, 255 aa, Arabidopsis thaliana
MDDGELEFSNSNMGGELPSCSMDSFFDELLRDSHACTHTHTCNPPGPENTHTHTCLHVHTKILPDKVSTDDTSESSGKKRPLGNREAVRKYREKKKAKAASLEDEVMRLKAVNNQLLKRLQGQAALEAEVTRLKCLLVDIRGRIDGEIGAFPYQKPAVTNVPYSYMMHPCNMQCDVDNLYCLQNGNNGEGASMNEQGLNGCEFDQLECLANQNLAGKEIPVCSNGIGTFTVNGSGVNKRKGDILVPLDLFPRGCP

SEQ ID NO: 508 - protein, 300 aa, Brassica napus
  misc_feature (191)..(191): Xaa can be any naturally occurring amino acid
  misc_feature (255)..(255): Xaa can be any naturally occurring amino acid
MGVREKDPLAQLSLPPGFRFYPTDEELLVQYLCRKVAGYHFSLQIIGDIDLYKFDPWDLPSKALFGEKEWYFFSPRDRKYPNGSRPNRVAGSGYWKATGTDKIIMSDGHRVGIKKALVFYAGKAPKGTKTNWIMHEYRLIEHSRSHGSSKLDDWVLCRIYKKTSGSQRQAVASPVQACLEDQSTNMSSSPXSSSQLDDVLDSFPEMKDRSFDLPRMNSLRTILNGNFEWASLAGLNPMPELAPMTYGLSNYGGYXAFQSAESGCRSSQVDQEQNSTELTQSLGYSSSGFGLSGQMYEFRQ

SEQ ID NO: 509 - protein, 625 aa, Oryza sativa
MKREYQEAGGSSGGGSSADMGSCKDKVMAGAAGEEEDVDELLAALGYKVRSSDMADVAQKLEQLEMAMGMGGVSAPGAADDGFVSHLATDTVHYNPSDLSSWVESMLSELNAPLPPIPPAPPAARHASTSSTVTGGGGSGFFELPAAADSSSSTYALRPISLPVVATADPSAADSARDTKRMRTGGGSTSSSSSSSSSLGGGASRGSVVEAAPPATQGAAAANAPAVPVVVVDTQEAGIRLVHALLACAEAVQQENFAAAEALVKQIPTLAASQGGAMRKVAAYFGEALARRVYRFRPADSTLLDAAFADLLHAHFYESCPYLKFAHFTANQAILEAFAGCHRVHVVDFGIKQGMQWPALLQALALRPGGPPSFRLTGVGPPQPDETDALQQVGWKLAQFAHTIRVDFQYRGLVAATLADLEPFMLQPEGEADANEEPEVIAVNSVFELHRLLAQPGALEKVLGTVHAVRPRIVTVVEQEANHNSGSFLDRFTESLHYYSTMFDSLEGGSSGQAELSPPAAGGGGGTDQVMSEVYLGRQICNVVACEGAERTERHETLGQWRNRLGRAGFEPVHLGSNAYKQASTLLALFAGGDGYRVEEKEGCLTLGWHTRPLIATSAWRVAAA

SEQ ID NO: 510 - protein, 305 aa, Glycine max
MEEDQCWIKSRRKYSMSSNLDSSTNYPSSYDDHSSWEEQAFAKDAARSGCTWPPRSYSCSFCRREFRSAQALGGHMNVHRRDRARLKQPYSPQNEILSVDLEKITTQPLNSVQISFTSLGYLYPSSLGVLTHNNTNPNSDPYSHAPPSPSKVLVSSINKRGREKPQIPLYKGCHESSPDLPSKSMSNLTEDFRFCSRRLDPEAGVEKKLKGLDSRCGSTEGDDDKTDVAVSLNLFMNLARPTVQFETKEKDTSFKKRKEDASSIPFFPKSCSVDRLHMQSKMFELSPSSIEELDLELRLGYRSMV

SEQ ID NO: 511 - protein, 195 aa, Glycine max
MSSHALNTNVNALDHFEIPVTTPFQDVSASVPSIAAFCRSSSFRNIFLTENWAELPLKENDTNDMVIYGALRDAAATGWFPANGNEVSNVSVAVKMENEGQNSKTTAARGTRTPPKKGLSYRGVRRRPWGKYAAEIRDTKRNGVRVWLGTYETAEDAALAYDRAAFKMRGSKAKLNFPHLIGSDHEPIKVTLKKH

SEQ ID NO: 512 - protein, 207 aa, Triticum aestivum
MAANYYWGMWGAATTSSTAATCPAPASAAEPSWEEQAFARDAAGHLGAGCVWPPRSYTCTFCRREFRSAQALGGHMNVHRRDRARLRQCVSPPDHQAQPQPTSPHDHHEHLQPGMQYRAAVRPKSPQDQQASMIGPSTTSPSYISSIIKESRNKVFISMPAEEASESGDEGERRKRRRVVDQPPAVALPFFLRWSPASSEREGMGAD

SEQ ID NO: 513 - protein, 495 aa, Rhodopseudomonas palustris CGA009
MVERILIADDDAVQRRLVENMVQKCGYEAVSVDSGDAAVEALTAPDAPAIDAVVLDLVMPGLDGLGVLSKIRASGLDVPVIVQTAHGGIDNVVSAMRAGAHDFVVKPVGIERLQVSLRNALNASAMKGELQRIRHAREGRLTFSDIITRSEAMAPVLRAAEKAAGSAIPVLIEGESGVGKELFARAIHGSSDRRSKPFVAVNCGAIPDNLVESILFGHEKGAFTGATERHDGKFVEASGGTLFLDEVSELPLAAQVKLLRALQEGAVEAVGGRRPVKVDVRIISATNRRLLDRVKAGQFREDLFYRLHVLPLTIPPLRTRREDIPPLLRHFLMRFCAEEKRSIGGITGEAMVRLAQLDWPGNIRQLENAVYRAVVMSDGDQLGLADFPLAIAPSVVPAEDTTGEPLVIERSEPQFVAASEVPIAPLPSVGNLSMLTADDEVRPLDEMEREIIRFAISHYRGQMSEVARRLKIGRSTLYRKLDEIEADRAAQAEAR

SEQ ID NO: 514 - protein, 276 aa, Oryza sativa (japonica cultivar-group)
MHPSGGALSVPPGFRFHPTDEELLYYYLRKKVAYEAIDLDVIREIDLNKLEPWDLKDRCRIGTGPQNEWYFFSHKDKKYPTGTRTNRATTAGFWKATGRDKAIFLANACRIGMRKTLVFYVGRAPHGKKTDWIMHEYRLDQDNVDVQEDGWVVCRVFMKKSYQRGLNPADMAAVDDDDLLHHHHHPFPPAQLHGGAADHKHDGAGGHHHHHLMQPHHHYDDFPSFDPSMQLMAAPSHHQHLMDQLAGGGGGTASSLQRLPLQYLGCEAADLLRFSK

SEQ ID NO: 515 - protein, 126 aa, Oryza officinalis
MSERRRREKLNEMFLILKSVVPSIHKVDKASILAETIAYLKELEKRVEELESNNQLSPCALETRRRKCSEITGKKVSAGAKRKASAPEVASDDETDGERHCVSNVNVTIMDKEVLLVVQCQWKELL

SEQ ID NO: 516 - protein, 157 aa, Gossypium herbaceum
NKGSWTAEEDRRLAKYIEIHGAKRWKTIAIKSGLNRCGKSCRLRWLNYLRPNIKRGNISDEEEDLIIRLHKLLGNRWSLIAGRLPGRTDNEIKNYWNSHLSKKIINHDVRTEQTSSSEQIVPHKAWETVQMEEEEVVKGSDEIENSEFSIDVDEFFD

SEQ ID NO: 517 - protein, 313 aa, Ceratopteris richardii
MAMPCSDIDLLDSDNDNVDDQHISLELRQVHEDTDDGSHDEPRELSLLNHESNLCKIVNSKGKGAEAGNSLLPSTGTSRGKIQIRRIENTTSRQVTFSKRRNGLLKKAHELSVLCDAEIALIIFSSTGKLFEYSSSRGIKKILERYKRCSGILQDVGGTVIRDVEYWKQEAERLKERLTYMEEIQRNMLGESLGSLQIKDLQNLEAKLDSGLYKIRGAKTQLMARQVQELQKKEQILLQQNEALRAKLAELSCLQAPVSGLTTATTSQDVQESSSGRGSRQRETSLSAAETTLQLASHNEQTFLLRAVPHMRL

SEQ ID NO: 518 - protein, 451 aa, Oryza sativa
MSFRSIVRDVRDSFGSLSRRSFEVRISGLPGLSGHHRGKSLGSLSELRDRPVVVDQSRWVGLPPELLRDVMKRLEEGESNWPSRKDVVACAAVCRTWREICKDIVQSPEICGKLTFPVSLKQPGPRDGLIQCFIKRDKSKLTYYLYLCLSPAVLSENGKFLLAAKRNRRATSTEYIISVDSKNISRSSNGYVGKMRSNFLGTKFVVYDTQPPYNAGSLMSCQHGSRRISSRRVSPKLPTGSYPIAHVKYELNVLGTRGPRRMQCTMHSIPASAVDPEGVVPGQPEQLLPGPFEESFRSTNTSSRFSFMDRSLDFSSSRFSEISGSANQQGEDDIPEAKERPLVLRNKVPRWHEQLQCWCLNFRGRVTVASVKNFQLIAAASSESSQLEQQQQQQQQNHASSSSSASDHGKVILQFGKVGKDMFTMDYRYPLSAFQAFAICLTSFDTKLACE

SEQ ID NO: 519 - protein, 355 aa, Coix lacryma-jobi
PSVKHMFPFCDSSSPMDLPLYQQLQLSPPSPKPDQSSSFYCYPCSPSFAAADASFHLSYQIGSAAASTPPQAVINSPELPVQQPLMEEAPVTATELGACASGGAQSAGVSLDRAAAAARKDRHSKICTAGGMRDRRMRLSLDVARKFFALQDMLGFDKASKTVQWLLNTSKAAIQEIMADDVDASSECVEDGSSSLSVDGKHNDPAEQLGGGDQKPAKGNGRSEGKKPAKARQAATTAKPPRKSGNNAHPVPDKETRAKARERARERTKEKHRMRWVKLASAIDVEAAAASVASDDRRPSSNHLNHYSSSSVNMPRAAAAELEERERCSSALNNRGRMQEITGASDVVLGFGNGA

SEQ ID NO: 520 - protein, 439 aa, Triticum aestivum
MSFRSIVRDVRDGFGSLSRRGFDVRFLGHRRGKSHSAVHELHDPAPVIQSSCWANLPPELLHDVIERLEASEATWPSRKHVVACAAVCRTWREMCQEIVKNPEFCGKITFPVSLKQPGPRDGTIQCFIKRDKSTQTYYLYLCLTSAVVAENGKFLLLAKRHSRPTCTEYTIFMNTDNTSRSSNMYIGKLRSNLLGTKFVIYDTQHPCNIPNVSQSGKTSRRFYSRKVSPKASPSTYSIAQVSYELNVLGTRGPRRMNCVMNSIPASSLVAGGTVLCQPDSAVAHSLDESFGSISFSKSSIRDRSIRFSSTRFSGISIGGSRNGGQALGDNDECKEWPLTLRNKAPRWHDQLQCWCLNFKGRVTVASVKNFQLVAATESTAEAPTPSQPAPPPPSEHDKVILQFGKVAKDMFTMDYRYPLSAFQAFAICLSSFDTKLACE

SEQ ID NO: 521 - protein, 281 aa, Picea mariana
AAGSGYWKATGADKPITAKGGKKRVGVKKALVFYVGKAPNGSKTNWLMHEYRVTNVSRPVKKKNSLILDDWVLCRIYNRRISAEKLALQQKESFNDVPMETIDEKEMENQLTSTSIEHSGIEQSNPSFDHLSKLGSSPTCYNSAPLCVSPMNSNICLQNLDFFQNSTTPFSDSTLKAPVQNTTFNPISSSINHQWTNCNSTDLMSGLHNDSSCSKPSSFSEPISEKEEVQSSFRLENFSQEQQQSLFNFGLEGLQNTFTHLDQITLPGAYQDWFYPNEPFH

SEQ ID NO: 522 - protein, 278 aa, Musa acuminata
MRCPTAPPSSNKLSAGLQHQQQQQPPPSAHDFTKTIVLASTPFGMVPDGWTGVADGAQIQYPVLGAANVGQENASANSFENSTEKRKAPKSKQESRSSGAEEEGTARGGATSKNKKKASGSDAPKETDYIHVRARRGQATDSHSLAERVRRERISERMKYLQELVPGCSKIMGKASTLDEIINYVQSLQRQVEFLSMKLAAAEPRMHLSSSNFFDREEVHGCSTWDAGLHGFHDGEIHRVSHLCPGNQCKVNNNTSIAVCNQAETAPFALWEVSYPTI

SEQ ID NO: 523 - protein, 478 aa, Arabidopsis thaliana
MANASQLSPTNKHFFKPLLPGFQRNLSHGSVSLLQNIPVKFFSEHIEGKHEGETVKLRADASKRTWEVKMDGNRLTEGWKEFVEAHDLRIRDFVVFRHEGDMVFHVTALGPSCCEIQYPQSISHEEGEESGEVGMIESSFKISEREVEENLQKEYDQSSADLNCFSQSVTHSNISNDLVTLPRDFAKRNGLDKGMHEIVLMNEEGKSWESEVRSRMSGQVFIVGGWKSLCSENKLKGGDSCTFKLLQNAKTPVFQLCSRIGESRFVKLTPTLNSLEIGKQHLPVSFTKGNGLIHPGEIILVDKDRVEWSMKLQVDNRGGMHIFGGNDWKSFCAANEVGAGESLTLELIRGGLSPLFKFFSKIEQPSFEAEDRRHKRARVHNGSQETDKGEPSRATKMGPELEKREKTAEKGEPSRASNKSSGKQGNLQKTQACSVTDHVAKVKESVVDTLTSIRRFQAELETMEQKLEDSLQEINKLS

SEQ ID NO: 524 - protein, 219 aa, Pyrus communis
GKLRSNFLGTKFTIFDGQPSHSGARIAKSRSTRLVNLKQETPRVPAGNYPVAQIQYELNMLGSRGPRRMQCTMDSIPSSSIEPGGVAPTQAEFSHNNAELFPSLSFNRSKSNRMESFLSGPLARQKDGVLVLRNKSPRWHEQLQCWCLNFHGRVTVASVRLSVGGFSGNGPPGPEHEKIILQFGKVGKDQFTMDYRYPISAFQAFSICLSSFDTKIACE

SEQ ID NO: 525 - protein, 573 aa, Brassica rapa
MKRDLHQFQGPNHGTSIAGSSTSSPAVFGKDKMMMVKEEEDDELLGVLGYKVRSSEMAEVALKLEQLETMMGNAQEDGLAHLATDTVHYNPAELYSWLDNMLTELNPPAATTGSNALNPEINNNNNNNSFFTGGDLKAIPGNAVCRRSNQFAFAVDSSSNKRLKPSSSPDSMVTSPSPAGVIGTTVTTVTESTRPLILVDSQDNGVRLVHALMACAEAVQSSNLTLAEALVKQIGFLAVSQAGAMRKVATYFAEALARRIYRLSPPQTQIDHSLSDTLQMHFYETCPYLKFAHFTANQAILEAFEGKKRVHVIDFSMNQGLQWPALMQALALREGGPPSFRLTGIGPPAADNSDHLHEVGCKLAQLAEAIHVEFEYRGFVANSLADLDASMLELRPSETEAVAVNSVFELHKLLGRTGGIEKVFGVVKQIKPVIFTVVEQESNHNGPVFLDRFTESLHYYSTLFDSLEGAPSSQDKVMSEVYLGKQICNLVACEGPDRVERHETLSQWSNRFGSSGFAPAHLGSNAFKQASTLLALFNGGEGYRVEENNGCLMLSWHTRPLITTSAWKLSAVH

SEQ ID NO: 526 - protein, 351 aa, Arabidopsis thaliana
MGRPPCCEKIGVKKGPWTPEEDIILVSYIQEHGPGNWRSVPTHTGLRCSKSCRLRWTNYLRPGIKRGNFTEHEEKTIVHLQALLGNRWAAIASYLPERTDNDIKNYWNTHLKKKLKKINESGEEDNDGVSSSNTSSQKNHQSTNKGQWERRLQTDINMAKQALCEALSLDKPSSTLSSSSSLPTPVITQQNIRNFSSALLDRCYDPSSSSSSTTTTTTSNTTNPYPSGVYASSAENIARLLQDFMKDTPKALTLSSSSPVSETGPLTAAVSEEGGEGFEQSFFSFNSMDETQNLTQETSFFHDQVIKPEITMDQDHGLISQGSLSLFEKWLFDEQSHEMVGMALAGQEGMF

SEQ ID NO: 527 - protein, 157 aa, Triticum aestivum
  misc_feature (96)..(96): Xaa can be any naturally occurring amino acid
MESGENNMGSNDGPNSKASLAARQRLRWTDELHEQFVEAVTQLGGPDRATPKGVLRIMGTPGLTIYHVKSHLQKYRLAKYIPDSSADGNKADNKDXPGDSLAGLDGSSGMQISEALKLQMEVQKRLHEQLEVQRQLQLRIEAQGKYLKKIIEEQHVF

SEQ ID NO: 528 - protein, 185 aa, Oryza sativa
MADGPGSPGGGGGSHESGSPRGGGGGGGGGGGGGGVREQDRFLPIANISRIMKKAIPANGKIAKDAKETVQECVSEFISFITSEASDKCQREKRKTINGDDLLWAMATLGFEDYIEPLKVYLQKYREMEGDSKLTAKAGDGSVKKDVLGSHGGSSSSAQGMGQQAAYNQGMGYMQPQYHNGDVSN

SEQ ID NO: 529 - protein, 322 aa, Ostreococcus tauri
GEAPSSNDTGDEATVTTNDATSDPTTTEGKAVKTRKPYTITKKRERWSDEEHALFVESLKKYGRAWKRIEEYIGTKSAVQIRSHAQKFFAKLQKEQIVASGSEGSGSTRKRGADRSTSQSKRSKSSYATDINLEIPPARPKKKPAHPYPRKATSQQPSGGSGERDNSGGTGKSSGTAQKWPTEASQEFIASTSSSAAIAAVLSVACDKMQNNLHQELRQGYFGIPTGMQPQQGMFAQPGMFPMNAMMSPFVAMNTVSGAPTPPPMTNPQQFLNYANFFSNYWPQFANAANANAVNVMFQQQQQQQQQQQQQQHKQRAGGETK

SEQ ID NO: 530 - protein, 204 aa, Populus tremula x Populus tremuloides
MEFERDLNLDATELRLGLPGTATRQSEKQTPNSNLAKSNKRSLPDMNEDPAGSSRENSSTVSSNEEKSHDQETAPPPIKAQVVGWPPIRSYRKNCLQAKKQEAEAAGLYVKVSMDGAPYLRKIDLKVYKGYPELLKALEEMFKSKVGEYSEREGYNGSEHVPTYEDKDGDWMLVGDVPWDMFINSCKRLRIMKESEARGLGCAV

SEQ ID NO: 531 - protein, 138 aa, Oryza barthii
SDDKALKRHLLRKYTGYLGGLRKELSKKRKKGKLPKEARQKLLTWWELHYRWPYPSEMEKIALAESTGLEQKQINNWFINQRKRHWKPTEEMQFAVMEAYHHQSTDAAAAFYVDVDARLVGATAAAPAAAVYTARPDH

SEQ ID NO: 532 - protein, 558 aa, Triticum aestivum
MGQDERQHPELPDMEKELSADAVACDHCSGPQAVVYCRADSARLCLPCDRHVHAANAVCSRHLRAPLCAACRATGAVFRHAGPEFLCSNCDFGRSRDAELPLHDRCTVQGYTGRPSAHDLAALLGVPDFDKPSAGKADDCWWAIWEEPQVFSLEDLIVPTTSSHGFQPLVTPSSPKIHNSPDGKTNDEVIRQLRELAEVDMGGGQITPREEAEQAAHLLPSRTESQHTTGNGDFGTDNSHEVATMPTPSYENGGWNNNDYHALNGACKTEHEQEQAPASSAEACLSSFVQMSELCPSMSNGSMMDDGQQANPGTGMPMQAFPKRSGFDVVAGPDRDIVISRYKEKRRTRRFDKQVRYESRKARADSRLRIKGRFAKANQRLKALRAAKELLSAPDGASPAPAAAPDADQHCIRNGDHGTTEEQADQPELPGPVDAPEDASKENVSPTKESDEVEDNGEVPLKFRNYLPHDERLRGGKVAPLSLPKFEDPIAADAAEPKQLENPFGNIAPKNPNWDLKRDVQKRIDKLEKRTQKALAEIALEQQKEKEALEEGGDAAQE

SEQ ID NO: 533 - protein, 156 aa, Medicago truncatula
MDKISILGDAVDYLKELKKQISDLQSEIESSSPRSFVPPPAGTRIKTSTMSTLPVQMKEKLCPNNVSGLKNQPTKVDVRVREGGIVNIHMLCAYKPDVLASTMKALDSLGLDVHRANISCFNGFSLDVFKAEQHNKDQELTPEQIEAVLLKALGFH

SEQ ID NO: 534 - protein, 93 aa, Brassica napus
  misc_feature (71)..(71): Xaa can be any naturally occurring amino acid
GSGDVIDDFTTGGEESMIGEGKEAERWQNARHKSEILSHPLYERLLSAHVACLRIATPVDQLPRIDAQLAXSQNVVAKYSTMDAAAQGLIFGD

SEQ ID NO: 535 - protein, 316 aa, Zea luxurians
LGVPSVKHMFPFCDSSSPMDLPLYQQLQLSPSSPKTDQSSSFYCYPCSPPFAAADTSFPLSYQIGSAADATPPQAVISSPDLPVQALMDHAPAPATELGACASGAEGSGASLDRAAAAARKDRHSKICTAGGMRDRRMRLSLDVARKFFALQDMLGFDKASKTVQWLLNTSKSAIQEIMADDASSECVEDGSSSLSVDGKHNPAEQLGGGGDHKPKDNCRGGGKKPAKASKAAATPKPPRKSANNAHPVPDKETRAKARERARERTKEKHRMRWVKLASAIDVEAAAAASVPSDRPSSNNLSHHSSLSMNMPCAAA

SEQ ID NO: 536 - protein, 253 aa, Triticum aestivum
MVSALSHVIRATPDQQQAYYPAGSAAVSGEQQHQHDAAAAAAIAEEQGRKRHYRGVRQRPWGKWAAEIRDPKKAARVWLGTFDTAEDAAIAYDEAALRFKGTKAKLNFPERVQGRTDLGFVVTRGIPDRLQQQQQCPATVGAPAMRPLPHQQQTVVPYPDLMRYAQLLQGAGSAGGAVNLPFGAMSPPSMSSSSPHILDFSTQQLIRVSPTSPAAAISSSGTTGPSTSSSTTTASSPGAAWPYTGEHKNNKDS

SEQ ID NO: 537 - protein, 234 aa, Triticum aestivum
  misc_feature (183)..(183): Xaa can be any naturally occurring amino acid
NKFVQKSRLVPVRNSRDIVDPRVRCDPPQRRFPLEKGISPPWWPSGDEEWWPELGIPKDQGPPPYKKPHDLKKAWKVSVLTAVIKHMSPDIEKIRRLVRQSKCLQDKMTAKEISTWLAVVKQEEELFMRLHPGARPPASAGGIASAISFTASSSEYDVDLADHCKGDEAGTHKMAMGEPTAFXLGAGLLNDQFLMPGPCKRKPADMDYGPGRGVVWAAPTRTLCLNNRGLPLNQ

SEQ ID NO: 538 - protein, 316 aa, Zea luxurians
LGVPSVKHMFPFCDSSSPMDLPLYQQLQLSPSSPKTDQSSSFYCYPCSPPFAAADTSFPLSYQIGSAADATPPQAVISSPDLPVQALMDHAPAPATELGACASGAEGSGASLDRAAAAARKDRHSKICTAGGMRDRRMRLSLDVARKFFALQDMLGFDKASKTVQWLLNTSKSAIQEIMADDASSECVEDGSSSLSVDGKHNPAEQLGGGGDHKPKGNCRGEGKKPAKASKAAATPKPPRKSANNAHQVPDKETRAKARERARERTKEKHRMRWVKLASAIDVEAAAAASVPSDRPSSNNLSHHSSLSMNMPCAAA

SEQ ID NO: 539 - protein, 357 aa, Heteropogon contortus
PSVKHMFPFCDSSSPMDLPLYQQLQLSPPSPKPDQSSGFYCYPCSPPFAADASLHLTYQIGSAAAATRPQAVIDSPDLPVQPLMEQAPAPATELGTCASGAQGAGVSISLDKAAAAARKDRHSKICTAGGMRDRRMRLSLDVARKFFALQDMLGFDKASKTVQWLLHTSKAAIQEIMADDVDASSECVEDGSSGLSVDGKQHNPAEQLGGGDQKPKGNGRSEGKKPAKSRKAATTPKPPRKSGNNAHPVPDKETRAMARERARERTKEKHRMRWVKLASAIDVEAAAASVASDRPSSNHLNHHHSSSSSSMSTMNMPRAAAAELEDRERCPSAVNSRGRMQEITGASDVVLGFGSGG

SEQ ID NO: 540 - protein, 109 aa, Brassica napus
QSLSCHVKEELCPSSLPRPKGQQARVEVRVREGRAVNINMFCGRRPGLLLATMKALDNLGLDVQQAVISCFNGFALDVFRAEQCQEGQEILPDQIKAVLLDTAGYAGLI

SEQ ID NO: 541 - protein, 373 aa, Arabidopsis thaliana
MGYMCDFCGEQRSMVYCRSDAACLCLSCDRNVHSANALSKRHSRTLVCERCNAQPASVRCSDERVSLCQNCDWSGHDGKNSTTTSHHKRQTINCYSGCPSSAELSSIWSFCMDLNISSAEESACEQGMGLMTIDEDGTGEKSGVQKINVEQPETSSAAQGMDHSSVPENSSMAKELGVCEDDFNGNLISDEVDLALENYEELFGSAFNSSRYLFEHGGIGSLFEKDEAHEGSMQQPALSNNASADSFMTCRTEPIICYSSKPAHSNISFSGITGESNAGDFQDCGASSMKQLSREPQPWCHPTAQDIIASSHATTRNNAVMRYKEKKKARKFDKRVRYVSRKERADVRRRVKGRFVKSGEAYDYDPMSPTRSY

SEQ ID NO: 542 - protein, 266 aa, Zea mays subsp. mexicana
PSADPSTDSAREPKRMRTGGGSTSSSSSSSSSMDGGRTRSSVVEAAPPATQASAAANGPAVPVVVVDTQEAGIRLVHALLACAEAVQQENFSAAEALVKQIPMLASSQGGAMRKVAAYFGEALARRVYRFRPPPDSSLLDAAFADLLHAHFYESCPYLKFAHFTANQAILEAFAGCRRVHVVDFGIKQGMQWPALLQALALRPGGPPSFRLTGVGPPQPDETDALQQVGWKLAQFAHTIRVDFQYRGLVAATLADLEPFMLQPEGD

SEQ ID NO: 543 - protein, 179 aa, Dendrobium grex Madame Thong-In
LTLTKCCMQRGSHFRSRSGSQEARSGSSMSRCNSMDTKFCYYNNYNVNQPRHFCKNCQRYWTAGGSMRNVPVGAGRRKNKHTGSVYRHTVITPDSLASLQVDGPDLVDHKPLSPFKVNGTILKFGPDAPLCESMASILNLGEQNLSSQLDFTAGAENREETSCSSACKPVKKKDITQHN

SEQ ID NO: 544 - protein, 579 aa, Brassica rapa
MKRDLHQFQGPPDTRFPNHGTANTGSSSKDKMMMVKEEEDGGNMDELLAVLGYKVRSSEMAEVALKLEQLETMMGNVQEDGLSNLATDTVHYNPSELYSWLDNMLTEFNPPPPEINNSFLAGAGGSDYDLKAIPGNAIYARSDQFAIDSSSSSNQAGDNSQSTKRLKSCSSPDSLVTGTTVTTTTTESTRSVGLAAESTRSMVLVDSQENGVRLVHALMACAEAIQNNDLSIAEALVKQIGFLAVSQAGAMRKVATYFAEALARRIYRLSPPQTQIDHSLSDTLQMHFYETCPYLKFAHFTANQAILEAFEGKKRVHVIDFSMNQGLQWPALMQALALREGGPPVFRLTGIGPPAADNSDHLHEVGCKLAQLAEAIHVEFEYRGFVANSLADLDASMLELRPSEIEAVAVNSVFELHKLLGRTGGIEKVLGVVKQIKPVIFTVVEQESSHNGPVFLDRFTESLHYYSTLFDSLEGVPSSQDKVMSEVYLGKQICNLVACEGPDRVERHETLSQWANRFGSSGFAPAHLGSNAFKQASMLLALFNGGEGYRVEENNGCLMLGWHTRPLITTSAWKLSAAH

SEQ ID NO: 545 - protein, 241 aa, Populus trichocarpa
MGRGRVQLKRIENKINRQVTFSKRRTGLLKKAHEISVLCDAEVALIVFSHKGKLFEYSTNACMEKILERHERYSYAERQLVATDLDSQGNWTLEYNRLKAKVELLQRNHRHYLGEDLDSVSLKELQNLEQQIDTALKLIRERKNHLMYQSISELQIKEKAIKEQNNMLVKQIKEKEKALAQPALWDQQDHGPNASSFLLPQPPLPCLNISYQEEDPEARRNYELDLTLEPIYSCHLGCFGT

SEQ ID NO: 546 - protein, 134 aa, Brassica napus
  misc_feature (123)..(124): Xaa can be any naturally occurring amino acid
  misc_feature (127)..(127): Xaa can be any naturally occurring amino acid
MTVEQDFEAVDQFPVGMRVLAVDDDQTCLRILETLLHRCQYHVTTTDSAQTALELLRENKNKFDLVISDVDMPDMDGFKLLELVGLEMDLPVIMLSAHSDPKYVMKGVKHGACDYLLKPVRIXXLKXIWQHVVR

SEQ ID NO: 547 - protein, 660 aa, Ustilago maydis 521
MAGIGVATGAALSSGINGSNDANATPSPWAASSSSSSSNITVGVLAIQGAFREHASHINRLNTLHPLHTIRSTLVRTPEQLADCDALIIPGGESTAISLGCERIGLLEPLRKWVRDGRPVWGTCAGMIMLAREASGGKKGGQQLIGGVDVRVGRNGFGSQIDSFETGLEIHGLDRPQELFNGVFIRAPVVDALLLPSDLEKVAVDQPTLVKRVDPNTLADSVRTPVTNTNAVPISATADLPANASEPALAKTTIADPALRIVVAPPLYDTSDPISSAQKRPPIEILATLPEPVTTPASPSNRPVSAHVAQRDPRMDVARRPDHDSQIVALRQGNILMTSFHPELTPDTRLHSLFVTKLVIPYKKQLQQHYIWLTGASHTFYLASSVQAPLGVCTAYAHCASKLSLDFGRKVNAKGSSNASATVQRSSQVLGLGSAVTRFDEGASTLLDAPISGTCTPVSYASPSPNPASHTHTHSHLHHSTTASNHDTSTPSSTTSIDLSNLASHPTYTALFPDPDLPIANISRIMKRSLPENAKIAKDAKECVQACVSELISFITSEASDKCAAEKRKTINGDDILYAMRVLGFDNYEEVLRVYLSRYRMDQESNPRQKKRAKTGTKIIDDDDDDDDEEDDDDAAEPDLTTRPHSLFHSPAFHHDSSNP

SEQ ID NO: 548 - protein, 310 aa, Arabidopsis thaliana
  misc_feature (158)..(158): Xaa can be any naturally occurring amino acid
MEAEEGHQRDRLCDYCDSSVALVYCKADSAKLCLACDKQVHVANQLFAKHFRSLLCDSCNESPSSLFCETERSVLCQNCDWQHHTASSSLHSRRPFEGFTGCPSVPELLAIVGLDDLTLDSGLLWESPEIVSLNDLIVSGGSGTHNFRATDVPPLPKXEPGCLKFETPDAEIDAGFQFLAPDLFSTCELESGLKWFDQQDHEDFPYCSLLKNLSESDEKPENVDRESSVMVPVSGCLNRCEEETVMVPVITSTRSMTHEINSLERNSALSRYKEKKKSRRYEKHIRYESRKVRAESRTRIRGRFAKAADP

SEQ ID NO: 549 - protein, 437 aa, Chromobacterium violaceum ATCC 12472
MTKTLRVLIVDDEPDIRELLELTLLKMGLAPVCAGSVAEARSALDAGGFDLALTDMRLPDGEGLEVVNHIGESGLDVPIAVITAYGSADNAVRAMKAGAFDYLQKPVSLAQLRSLVKTALKVETPVRAAVQQRLLGESPAIQEVLRLTDKLSRSQAAVYIGGESGTGKEQAARLIHELGPRADKPFVAVNCGAIPESLMESEFFGCRKGAFTGADADRDGFFQQAQGGTLFLDEVAELPLAMQVKLLRAIQEKTVRKLGASQEEAVDARIICATHRDLAARVESGQFRQDLYYRLNVLPLRMPPLRELRDDIPLFAERLLQRFGGASAPQLSADARRALQDYAYPGNFRELENILERAVALAAGPALSREDLQLTPCAEHAPEPGSGEPLQDYLDRVEREAIVKALEGTRYNRTQAAKKLGVTFRSLRYRMERLGVK

SEQ ID NO: 550 - protein, 138 aa, Oryza meridionalis
SDDKALKRHLLRKYSGYLGGLRKELSKKRKKGKLPKEARQKLLTWWELHYRWPYPSEMEKIALAESTGLEQKQINNWFINQRKRHWKPTEEMQFAVMEAYHHQSTDAAAAFYVDVDARLVGATAAAPASAVYTARPDH

SEQ ID NO: 551 - protein, 138 aa, Oryza longistaminata
SDDKALKRHLLRKYSGYLGGLRKELSKKRKKGKLPKEARQKLLTWWELHYRWPYPSEMEKIALAESTGLEQKQINNWFINQRKRHWKPTEEMQFAVMEAYHHQSTDAAAAFYVDVDARLVGATAAAPAAAVYTARPDH

SEQ ID NO: 552 - protein, 136 aa, Oryza meridionalis
SDDKALKRHLLRKYSGYLGGLRKELSKKRKKGKLPKEARQKLLTWWELHYRWPYPSEMEKIALAESTGLEQKQINNWFINQRKRHWKPTEEMQFAVMEAYHHQSADAAAAFYVDARLVGATAAAPAAAVYTTRPDH

SEQ ID NO: 553 - protein, 454 aa, Oryza sativa
MPNLGNGVKTNNDLPLVSDKLLIVKGIPFCPNNSKKNDLQGISRPDGRIEIDSMTEDVKTEPDGSVPEKILKKPDKILPCPRCNSMETKFCYFNNYNVHQPRHFCRNCQRYWTAGGAMRNVPVGAGRRRNKHVSKYCQAMMTCNNTVAPGDVSDVVHHQVITHGSSLLPATLKENETPTEFISEVPPCKSSASILDIGEPNDTDLVPLASGDNKEEKSCASSVVVSSCSENLMPDNAIMKEPNNRSGCCNGVALPFPTGPALVLPWSLGWNSVALMPATQCSMQPVLGLKDGIPCPPSWPPQLMVPAPGICTPVVPIPLVPPLWSCFPGWPNGMWNAQCPGGNTTVLPSTAPNKISCSGSSSLVLGKHSREESLQEEEKTRNYLWVPKTLRIDDPAEAAKSSIWATLGIKPDDKGIFKSFQPNVAKNGTAPESPQALQANPAAFSRSQSFQETT

SEQ ID NO: 554 - protein, 465 aa, Burkholderia thailandensis E264
MPLALIVEDDPNSLSGLTALLAADGFSVDTATSLAEARGALARSIPDVVLVDLNLPDGSGFDLLQNLPQQQPNGSLPVIVLTGNATVESAIEGLRHGVWDYLLKPVNIPRLRSLLARIPRPYELIEEVQALRASLRRLGRFGSLVGRSDAIQHVYDMIEHNARTETAVLLWGEPGTGKEAAARTLHELSRRRKGPFVAFDCRAAVQSPRNIETNGRAIESMLLGRERGAYTGVERRDPGLFEQASGGTLFLEEITALPLPLQEALLRALDSQNFMRVGGTTEIASDFRLIATTRRPAREAVANGTLREDLWLRLDAASIGLPPLRERDDDVVVMAEAFVDDLNRDARAAGLNITDKRIAPAFIRECLAYDWPGNVRELRERVRIAYDQSGDFIETLRAGDAYPQPGAALNGSSVQVRVGTPLADVEDLLIRATLDAVGGTRHRAATLLGISPKTLYNKLQRMKIG

SEQ ID NO: 555 - protein, 172 aa, Oryza sativa (japonica cultivar-group)
MARPQQRYRGVRQRHWGSWVSEIRHPLLKTRIWLGTFETAEDAARAYDEAARIMCGPRARTNFPLADATAAAAAAAASSSFLSAALVAKLHRFNLASVQATQRQREAAATAAAASSASATTPPLGNAAAADDDARTTTTYGAEWSGRFLEEQHVEQMIDELLDSNFSMEICY

SEQ ID NO: 556 - protein, 509 aa, Solanum tuberosum
MSIVTCEKAAASLSSSSNMNNDTNGAFCYTPQHQLVTPQYQNPPQQIKKKRNQPGNPDPEAEVIALSPKTLVAANRFFCEICNKGFQRDQNLQLHRRGHNLPWKLKKRENKEVVRKKVYICPESSCVHHDPSRALGDLTGIKKHFSRKHGEKKWKCEKCSKRYAVQSDCKAHFKTCGTREYKCECGTIFSRRDSFITHRAFCETLAMESARSVINGRNPTIFSPQLNLQFQQPHFFNSHEQIQATTFPMKKEQQSSDFRHIEIPPWLITTNSQPFQLGAINHGPSPRSNFSSSSIFPATTRLDQQYTQSGHKDLNLHHPNPNLRGPTLGYDSTGESGAVSPVHISATRLLQKAAQFGATISNKASAVTATAAYTGTVKIPHNTHVSVTSTDSATKQTHQKLSSREDLTSITGPANISGIMTSFSNGFDGSTMFEDAILFGGFNNLNSKKEDEEEDQQLYFNGSMNEEDHILTKDFLGLKPLSHTDDIFNIAALVNTEPHHFKNHKTWQS

SEQ ID NO: 557 - protein, 428 aa, Oryza sativa (japonica cultivar-group)
MGRHSCCYKQKLRKGLWSPEEDEKLMNHITKHGHGCWSTVPKLAGLQRCGKSCRLRWINYLRPDLKRGAFSQEEEDLIVELHAVLGNRWSQIATRLPGRTDNEIKNLWNSCIKKKLRQKGIDPNTHKPLAEVDRSKATPTISNDRTSESSDVDPSSGVALHNLSHLLSETAQSSELLPVKVTKPRTQAPGLARLKVPPKELFLDQLTSGHENLPSCRSSGPIPNFPFQQLLCYNNDFNSMDVGNRNSLWYNQNESSSSTISTVMPPVSPSTLSTSTGLNPSPDNANSRGTGIHNSQFYWDTNNPSSSSSTGSSGNNGLGFELQSTSSLLETNIFPWTDLAPEKDSQAQLEEELKWPDLLHGTFSEMPAPMQNLSQSLYEDVVEAESQFNMEGLCAAWSQNLLPQQHLPVVSDMYDKDLQRMSLSFENI

SEQ ID NO: 558 - protein, 327 aa, Sulfitobacter sp. EE-36
MKILAVDDDPIILELLSHFIEGMTDHTLVTAECAADALEAIKDNARAPFDSFLLDIQMPVTDGIQLASQIRAMKQYLDAPILMLTAMSEKSYIDAAFSAGATDYVTKPFEMTELKARLSLVERAVDGLATRTSKVFAAKAVTHHDGRPERAVQLHEPMAIHDVNNLIEFMALENYVQQLSRSDLFGSICFAFNIRDVEIFHENMSNFEFCSMLSDVGEIISDTLEGCQFLMSYAGGGTFVCITESGWRPDPKLLANNINISLAKTELFDNRGQHINPRICAGKAVRLMWKTNSSVMDALSEAHASAEEATANYQKVQNDFWNVGRTA

SEQ ID NO: 559 - protein, 256 aa, Triticum aestivum
AYLGDTTEQVCTKKQAGTGPEFPGYRRPARPGGRRISWNSLSTARRKPRNRQPTNLPSQPVHTAAPSPDLAGRAALRPSPVPRLEPRAANSAGSSTLAGENNMGSNDGPNSKASLPARQRLRWTDELHEQFVEAVTQLGGPDRATPKGVLRIMGTPGLTIYHVKSHLQKYRLAKYIPDSSADGNKADNKDPGDSLAGLDGSSGMQISEALKLQMEVQKRLHEQLEVQRQLQLRIEAQGKYLKKIIEEPAAVPGAGV

SEQ ID NO: 560 - protein, 215 aa, Aspergillus oryzae
MSSTSPSKEPEVEPEVQSGEEQEQMDKEQQDQAQNQGEFEVKEQDRWLPIANVARIMKLALPDNAKIAKEAKECMQECVSEFISFITSEASEKCQQEKRKTVNGEDILFAMTSLGFENYAEALKIYLSKYRETQSARGEHQNRPTSSGYASGGPVGGVSSAPGGRPATAGGFPDAADNTNSIMNPSLDPTEQDPSAYGYPPMVGQPHNGTAGDSY

SEQ ID NO: 561 - protein, 261 aa, Picea abies
MGRGRVQLRRIENKINRQVTFSKRRNGLLKKAYELSVLCDAEVALIIFSTRGKLYEFASSSMNKTLERYEKCSYAMQDTTGVSDREAQNWHQEVTKLKGKVELLQRSQRHLLGEDLGPLNVKELQQLERQLEVALAHLRSRKTQVMLDQIEELRQRERLLHEVNKSLQKKLSETEGRDVITGIEQTSNTNTGTNGPWDSSITNTAYALSHPQQNSNASLHHVDCEPTLQIGYQPVPPESIGPPHQPQHNQTQNQYMQGWWV

SEQ ID NO: 562 - protein, 285 aa, Triticum aestivum
GGGRHRRLLSATPLRPETGEMEGFEFFQIVLDNSSSRLRLPDKFTMVLLDGGKPQEVKLREAGHGRRFWDVKVVLDADGHMYLERGWEQFARAHDLRLGYFLVFSYDGDAVLTVKVFDVSMCRRHYKHDGDTSSESSSDGDSGSSNTSDGGSGGNNRSLVEMDVEDGPTGQFSAMLRKCNLGMKQEQYLNVPVDFQLAHGYAERSKVELRMRGKSWLVHLKHNPKTGGRSRASFRYGWHQFCVDNALGEGDTCFFRALRQGSAGGGGEDHLLKVEVRRRDGSFLV

SEQ ID NO: 563 - protein, 153 aa, Glycine max
MADGPASPGGGSHESGEHSPRSNVREQDRYLPIANISRIMKKALPANGKIAKDAKETVQECVSEFISFITSEASDKCQREKRKTINGDDLLWAMATLGFEDYIDPLKIYLTRYREMEGDTKGSAKGGDSSSKKDVQPSPNAQLAHQGSFSTRC

SEQ ID NO: 564 - protein, 208 aa, Medicago truncatula
MVQQTKKFRGVRQRQWGSWVSEIRHPLLKRRVWLGTFETAEAAARAYDQAAILMNGQSAKTNFPVTKNQGEEVASDTPYNGGGGDDSFLSPKALSELLSTKLRKYCKDPSPSLTCLRLDNDNSHIGVWQKRAGPHSDSNWVMRVELGGKKKTIESEEIGSKQHTIDGGNNSNADNENRVVVEEEERVALQMIEELLNWNYPCGSTSSN

SEQ ID NO: 565 - protein, 205 aa, Helianthus annuus
MEKLQNANAVLRRLPPGFRLHPTDEELVVQYLKRRVHSSPLPASIIPEVDVCKSDPWDLPGDSDQQEERFFFSTREIKYPNGNRSNRATQSGYWKATGLSRQIMGANQVGLVGIKKTLVFYKGKPPTGSRTDWIMHEYRLATTQPTQGLEKWVLCKIFLKKRGNYKDEKKNVPVFYDFLATPKVKTSSSSSSGSSGITEESSTNC

SEQ ID NO: 566 - protein, 285 aa, Triticum aestivum
  misc_feature (221)..(221): Xaa can be any naturally occurring amino acid
  misc_feature (251)..(251): Xaa can be any naturally occurring amino acid
MGRHAGTGGGGGVQQKLRKGLWSPEEDEKLYNHIIRYGVGCWSSVPKLAGLQRCGKSCRLRWINYLRPDLKRGSFSQQEEDAIVGLHEILGNRWSQIASHLPGRTDNEIKNFWNSCLKKKLRQRGIDPSTHKPISGVAGLEPDQASKDERPQAADGLALKQQQQQQQVFDPFPVADTFGAGFDGAGMPLYDHLGGKDAARFVDYSSVLDVSENLGYGESSXHSSNWNSAPEASNALEGEALHWASESKVEXFAGYAGDEDDKFALPWHGQQEHSMAHFDFNLEYF

SEQ ID NO: 567 - protein, 137 aa, Zea mays
  misc_feature (56)..(56): Xaa can be any naturally occurring amino acid
MGRHSCCYKQKLRKGLWSPEEDEKLMNHITKHGHGCWSSIPKLAVQLPKFEKTNCXGLQRCGKSCRLRWINYLRPDLKRGAFSQDEEDLIIELHAVLGNRWSQIAAQLPGRTDNEIKNLWNSCIKKKFRQKGIDPHT

SEQ ID NO: 568 - protein, 333 aa, Glycine max
MASDAKLSSSESLNGLKFGQKIYFEDVGRGGSVQPAQPPRCQVEGCEVDLSNAKTYYSRHKVCGMHSKSPTVIVAGLQQRFFFWSWDGFLFHQLPEFDQGKRSCRRRLAGHNERRRKPPPSSLLTSRYARLSSSAFDHSGRGGNFLMELASYPKLSLRNSLPTPRSSELAPGNQTSTLSWHGNSETSSDLFLQGSVGGTSFAGPGHPPGESYTGVTTSSCALSLLSNQTWGSRNPAPSLGLNNMVNFHGTPMTQPAASSHGASIHQLPNTPWCFKGIDSGNCSPEGVPDLGLGQISQPLSSQLHGELDLSQQGRRHYMDLEQSRAYESAHWSL

SEQ ID NO: 569 - protein, 187 aa, Glycine max
MEIKSRERIQVSIEKVRRDSTVEVEDEEEEDESVVGGEGGLAEDEKKKGGGGSGRRGSSGFFPPSCQAEMCGADLTVAKRYHRRHKVCELHSKAPSVMVAGLRQRFCQQCSRFQELAEFDEAKRSCRRRLARHNERRRKSNAETCNEGCSGSKGQHPTESHCRNADVWGRIQMNIAKNSGYNSFHIR

SEQ ID NO: 570 - protein, 298 aa, Oryza sativa (japonica cultivar-group)
MGLDRCESEEALGSSESEQPTRPARPRGKRSRAAEVHNLSEKRRRSRINEKMKALQSLIPNSSKTDKASMLDDAIEYLKQLQLQVQMLSMRNGLYLPPVNLSGAPEHLPIPQMSAALDQNSAKASDPSVVLQPVNQTSGALLPFELASQHKPLFLPGVPNATALEPRFLVESSRSNLQSLRFTEPAEMIYPDEMMLKHRLTSASESTIVPGTDEKSVRQNTYMMNADRFDRYALSKDQLQHIMPKNTESVLDMPHLQRILTKVLIVSDYKLTIQLPILDRLQTSDTKVRVEGRIKVNP

SEQ ID NO: 571 - protein, 250 aa, Solanum commersonii
  misc_feature (231)..(231): Xaa can be any naturally occurring amino acid
MGRGRVQLKRIENKINRQVTFSKRRSGLLKKAHEISVLCDAEVGLIVFSTKGKLFEYATDSCMERLLERYERYSFAEKQLVPTDHTSPGSWTLENAKLKARLEVLQRNEKLYVGEDLESLNMKELQNLEHQLASALKHIRSRKNQLMHESISVLQKQDRALQEQNNQLSKKVKEREKEVEQQNQWDQQNHEINSSTFVLPQQLDSPHLGEASQNTNVVDNGEVEGGNSSQXQGAANNTVMPQWMVRHLNG

SEQ ID NO: 572 - protein, 189 aa, Brassica rapa subsp. pekinensis
MVEVEELEPLSPVEDGDEGEEEEEEDISYDDLKRRMWKDQNLMEKLKQQKRDNTDVVSLPTHRAEASRRKKMARSQDSVLKYMMKIMEVCKAKGFVYGIVPEKGKPITGSSDSLRRWWKENVDFDQNAPNAVAGYLTLAAAAAELIEKEPSSLLHMLQELQDTTLGSLLSALMQHCAPPQRRCKLEKIL

SEQ ID NO: 573 - protein, 198 aa, Gossypium barbadense
MAPKKDGVSKRVFNKGSWTAEEDRRLAKYIEIHGAKRWKTIAIKSGLNRCGKSCWLRWLNYLRPNIKRGNISDEEEDLIIRLHKLLGNRWSLIAGRLLGRTDNEIKNYWNSHLSKKIINHDVRTEQTSSSEQIVPHKAWETVQMEEEEVVKGSDEIENSEFSIDVDEFFDFTTEGCFSLDWVNKFLELDDQQDPLAMV

SEQ ID NO: 574 - protein, 383 aa, Arabidopsis thaliana
MSFNSSHLLPPQEDLPLRHFTDQSQQPPPQRHFSETPSLVTASFLNLPTTLTTADSDLAPPHRNGDNSVADTNPRWLSFHSEMQNTGEVRSEVIDGVNADGETILGVVGGEDWRSASYKAAILRHPMYEQLLAAHVACLRVATPVDQIPRIDAQLSQLHTVAAKYSTLGVVVDNKELDHFMSHYVVLLCSFKEQLQHHVCVHAMEAITACWEIEQSLQSLTGVSPSESNGKTMSDDEDDNQVESEVNMFDGSLDGSDCLMGFGPLVPTERERSLMERVKKELKHELKQGFKEKIVDIREEIMRKRRAGKLPGDTTSVLKEWWRTHSKWPYPTEEDKAKLVQETGLQLKQINNWFINQRKRNWNSNSSTSSTLTKNKRKRTGKS

SEQ ID NO: 575 - protein, 203 aa, Brassica napus
  misc_feature (190)..(190): Xaa can be any naturally occurring amino acid
  misc_feature (192)..(192): Xaa can be any naturally occurring amino acid
  misc_feature (195)..(195): Xaa can be any naturally occurring amino acid
MAAKRVHGDYPSSTIKRHKDLDFPEDTTTALENDDGAAAINLLSLLLQCAEYVATDHLREASILLSEISETCSPFGSSPERVVAYFAQALQARVISTYLSSACSQLSESPLQSQKIFAALQTFNSLSPLIKFSHFTKFSPFSAALAVFDSVHIIDLDVMQGLQWPGLFHILASRPRKIRSIRITGFGPSXDXLAXTGRRLADF

SEQ ID NO: 576 - protein, 569 aa, Lycopersicon esculentum
MKRELNDVYYGGNKEDVHGFENINMVPTDFDPMDDTDIWLNGNFSNDFTSLQDFPCMSSSSSTSNSLPTEQSDPSSGWAVQKSDADEQDFDTISDQECLNVMDLIDGDHEFLDPMISFFNQQQKEQANEEQVSIFQGDSELALMFLDWLKQNKDNISAEDMRSIKLKRSTIESASKRLGSTKEGKKQLLRLILDWVEQHRLQKKQMREEQSIQNSAPFNFNNPNACFYNASFTDSSSVMTGPIQGYFVPPYNQTMSGSSTSQSWSQSQFIMANASQYNRFPENNITNNVAIPDQPLFSAQYDQYQIFDGSGERLARLGTCATKEARKIRMARQRRVPLHHYRHQTQNQRQISNEKSVMMGRKINNCAISQANNPGNWVYWPCAAAAPPIAMVPLADTPQSLPMERSPVQSQKHQKNGSTDKRQACKTEKNLKFLMQKVLKQSDVGHLGRIVLPKKEAESHLPQLETRDGISIAMEDIGTCRVWNMKYRFWPNNKSRMYLLENTGDFVVANGLQEGDFIVIYADIKCGKYLIRGVKVRPNGAKSDGMQPAKKIVRKIAAVASSPFAQAVG

SEQ ID NO: 577 - protein, 314 aa, Medicago truncatula
MMMDEGEGKKKVVVQKTEACGFMAGVEDELGFVNVKGDNNNGSGQRIHHDHGFVAAAFGTVHRKKRMARQRRSSSSTITIHLKNLPSSTTTTTTTTTSHVPISPIPPLFHSLPPAREIDHRRLRFLFQKELKNSDVSSLRRMVLPKKAAEAFLPVLESKEGILLSMDDLDGLHVWSFKYRFWPNNNSRMYVLENTGDFVSTHGLRFGDSIMVYQDNQNHNYVIQAKKACDQDEYMEEANDTINHIFVDDYEVNKSCFDVAYPAMNDTSMSFIYDTTISNDSPLDFLGGSMTNYSRIGSVETFGSVENLSLDDFY

SEQ ID NO: 578 - protein, 311 aa, Zea mays
MNEQGLGGLGGGRGAVQGHGREAMALLQHQQLQQQRRQLEEEDEVRRQMFGGVAAFPAALGHGQQVDYGEDAGGLGDSDAGGSEPEPPPERTRGGSGGGGKRSRAAEVHNLSEKRRKSKINEKMKALQSLIPNSNKTDKASMLDEAIEYLKQLQLQVQMLSMRNGVYLNPPYLSGTIEPAQASQMFAAVGGGNITASSSGAVMPPVNQSSGLQVFDPLNPPRDQPLSFVLPNVDKTIQEAPFHLESSQFHPRPFRMPESSEMMLPGEVVAKHQLTSIQGRVSMPGIGMNPIRQESSTVKADQFDGCSHSKE

SEQ ID NO: 579 - protein, 493 aa, Oryza sativa
MDTFPFQWPMDPAASSGLDAGFLPPPAAVAPDDGVGYYDPPAGADVDAAALPEFAAAFPPCAPDAAAAVLAMRREAEEVAGIRLVHLLMSCAGAIEAGDHALASAQLADSHAALAAVSAASGIGRVAVHFTTALSRRLFPSPVAPPTTDAEHAFLYHHFYEACPYLKFAHFTANQAILEAFHGCDHVHVIDFSLMQGLQWPALIQALALRPGGPPFLRITGIGPPSPTGRDELRDVGLRLADLARSVRVRFSFRGVAANSLDEVRPWMLQIAPGEAVAFNSVLQLHRLLGDPADQAPIDAVLDCVASVRPKIFTVIEQEADHNKTGFLDRFTEALFYYSAVFDSLDAASASGGAGNAMAEAYLQREICDIVCGEGAARRERHEPLSRWRDRLTRAGLSAVPLGSNALRQARMLVGLFSGEGHSVEEADGCLTLGWHGRPLFSASAWEAAGDGGGDNNNNSNSNVSGSSGSDSNNSGSSNGKSSGARDGSSVCL

SEQ ID NO: 580 - protein, 202 aa, Oryza sativa
MVRGKVQMRRIENPVHRQVTFCKRRGGLLKKARELSVLCDADVGVIIFSSQGKLHELATNGNMHNLVERYQSNVAGGQMEPGALQRQQVAEQGIFLLREEIDLLQRGLRSTYGGGAGEMTLDKLHALEKGLELWIYQIRTTKMQMMQQEIQFLRNKEGILKEANEMLQEKVKEQQKLYMSLLDLHSQQPTQPMTYGNRFFSI

SEQ ID NO: 581 - protein, 376 aa, Catharanthus roseus
MALLDQASNLSPMPFDFTRKRKSRRRDGTKNVAETLAKWKEYNEKLDALDGGKPARKVPAKGSKKGCMKGKGGPENSHCKYRGVRQRTWGKWVAEIREPNRGSRLWLGTFRNAIEAALAYDEAARAMYGPCARLNLPNYRASEESSSLPTTSGSDTTTASGISEVSVYEDKKFTPVVSGLKQDDKGESLESADSKPQLLVDAGTPMSAVKEEPKEYQVMDSQSEGQFGDEEPPSKLVCKEVDFGQDQAVVPAVKNAEEMGGEMGGDILKGCSLSEMFDVDELLSVLDSTPLHASDFQHGMGNGNVKAEAAYNYAPSWDSAFQLQNQDPKLGSQQHMAQTPPEINSGLDFLQPGRQEDSYFTLGDLDFLDLGAELGL

SEQ ID NO: 582 - protein, 65 aa, Zea mays
TARQRWQPTPMQLQILENIFDQGNGTPSKQRIKEITAELSHHGQISETNVYNWFQNRRARSKRKQ

SEQ ID NO: 583 - protein, 210 aa, Catharanthus roseus
MYQSNAHNSDHLTFLPPLVDYQFLNNDFDFSEIFTDFNYANYNYNTSTSDNFSGFQFNENCEEIISPNYASEDLSDIILTDIFKDQDNYEDEVVAGEQEEELITTPTSRGGGGGGCEQRSNEEWIRYRGVRRRPWGKFAAEIRDPKRKGSRIWLGTYETAEDAALAFDQAAFQLRGSRARLNFPNLIGSANAPVRVSPRRRSSSCHLRPQ

SEQ ID NO: 584 - protein, 555 aa, Arabidopsis thaliana
MANPLLYSPINPQFFQPLLPGFANHLDIPVAFFLKYLVGTNVGKTAELRSDASEMTWKVKIDGRRLSNGWEDFTIAHDLRVGDIVVFRQEGELVFHVTALGPSCCEIQYGEDTLEEDKIEKLCDTENVSSKKKSLKREAESAPDNSLDSCFVATVTGSNLKRDTLYIPKEFALSNGLMNKYQIVLMNEEGESWKIDLRREAYNYGRFYMRRGWRSFCIANGKKPGDVFAFRLVKNEETPVIQLFPMTIEDLDKLQSLPRHKIRKTEAAPSSPDLSSFVATVTASNLSRDRLYLPKTFIMSNGLLKKFQMCLMNEEGESWTIDVKHEAHTGRFLTIRGWRRFCVANGKKPGDLLKFKLVHNEETPVLQLLPLKSEDLHKLDPSNDTRHGQSLEVTKKEFLGTEATENEFLGAEVYRNDSFKASEKDTLPFAEPINEDVRQGQCSQAIKQEYVSTEEKNSTSQNRFVTLTLTHSSKLNLPFEFMKGNGIKKAGKITMVDRYDAKWRTSLLMDKIGAMSLGRGSKGFCEVNGVEMNESFVLELIWEDTVPLLKFCSKV

SEQ ID NO: 585 - protein, 584 aa, Arabidopsis thaliana
MMMFNEMGMYGNMDFFSSSTSLDVCPLPQAEQEPVVEDVDYTDDEMDVDELEKRMWRDKMRLKRLKEQQSKCKEGVDGSKQRQSQEQARRKKMSRAQDGILKYMLKMMEVCKAQGFVYGIIPEKGKPVTGASDNLREWWKDKVRFDRNGPAAIAKYQSENNISGGSNDCNSLVGPTPHTLQELQDTTLGSLLSALMQHCDPPQRRFPLEKGVSPPWWPNGNEEWWPQLGLPNEQGPPPYKKPHDLKKAWKVGVLTAVIKHMSPDIAKIRKLVRQSKCLQDKMTAKESATWLAIINQEEVVARELYPESCPPLSSSSSLGSGSLLINDCSEYDVEGFEKEQHGFDVEERKPEIVMMHPLASFGVAKMQHFPIKEEVATTVNLEFTRKRKQNNDMNVMVMDRSAGYTCENGQCPHSKMNLGFQDRSSRDNHQMVCPYRDNRLAYGASKFHMGGMKLVVPQQPVQPIDLSGVGVPENGQKMITELMAMYDRNVQSNQTPPTLMENQSMVIDAKAAQNQQLNFNSGNQMFMQQGTNNGVNNRFQMVFDSTPFDMAAFDYRDDWQTGAMEGMGKQQQQQQQQQDVSIWF

SEQ ID NO: 586 - protein, 220 aa, Brassica napus
MESVELSLKNINRKEKPDDFSVDDLLDFSNDDVFVEDETKLKAAGVSVSLNDETTLNRSNELSTHACEDFGSELAVPTDDLAELEWLSNFVEDSYSAPTKKPVWLTGDRRHPVAPVNEGLCFKAPLPVKIRTKRARTGVNVWSLGSSSLTDSSSSSSSSSNPSSPLWLTGAEFLDEKAVKRQKKKKVLEYGGQTQTQTRRGRHCGGHKTPQCRVLPSGAK

SEQ ID NO: 587 - protein, 193 aa, Oryza sativa (japonica cultivar-group)
MEQRAAAAAQQRQGRRQSAAACGIRRARAETRHPVYRGVRFRAGKWVSEIRELRKPSRIWLGTYATPEMAAAAYDAAALALRGRGAALNFPDAARSRPAPASASADDVRAAATAAAAAMAHQEEDDDSRRQLEDGGGGGGVVDEDDVLEMPRLMVSMAEGLMISPPPVMLGLQADGGGIMDEGGSVVRLWDHS

SEQ ID NO: 588 - protein, 289 aa, Medicago truncatula
MGMDSSSGQQQQMSNQSLESMLTCSKGEQDKKPKPPQPEALKCPRCDSNNTKFCYYNNYSLSQPRYFCKSCRRYWTKGGTLRNVPVGGGCRKNKRSSSASSKRSQDQPFQTNPNPLTCFPSLSYDSNDLTLALARLQKGHLGFDHEHDFSILGNQTNTSCGILNNHGMNHSSNNQGFFEALMGSQNNVQNLYYMGEVDNGNANGNGNGEMMLPYDHEMSIATTQAVTVTTMKQEMCNVREQNENRVLLGFPWQFNNGDTNMAEMDHLGRAGWNGLTSSWGHGLLNSPLM

SEQ ID NO: 589 - protein, 621 aa, Cucumis melo
MMFNEMGMCGDMDFLSASIVEGDAVAPPTDPEVVVEDDYSDEEIDMDELERRMWRDKMRLKRLKEQSKVKEGIDIVKQRQSQDQARRKKMSRAHDGILKYMLKIMEVCNAQGFVYGIIPEKGKPVTGASDNLREWWKDKVRFDRNGPAAIAKYQADNAIPGRNDGCNSIGPTPHTLQELQDTTLGSLLSALMQHCDPPQRRFPLEKGVPPPWWPSGAEEWWPQLGLPKDQGPPPYKKPHDLKKAWKVGVLTAVIKHMSPDIAKIRKLVRQSKCLQDKMTAKESATWLAIINQEEILARELYPDSCPPLSSGGGSGSLVINDCSEYDVEAVRSDDNHIDVQDRKPANHSSFNLGMDRMRDRVSLRQPPYAMKGEVTTNLDFMRKRKPTSDLNMMMDQKIYTCEFLQCPYSELRLGFNDRTSRDNHQLTCPYRTSSEFSGSSFHVNEVKPVIFPQSFAPPKSNAPPGQLSSVIFPTLFHLSPEDGQKLISELIYDTNIQGNKNNLNTGNSATTENQKSPSIKRSNLNKMIDFRDQGLMMEGNFFDGSNVSSSHQMFTRDEGQSDRFKPMNSPFENNHHHHNNNNNNFHLMFSSPFDLSTFDYKEEVPGVAAIDTLSKQQDVSM

SEQ ID NO: 590 - protein, 252 aa, Brassica oleracea var. botrytis
MGRGRVEMKRIENKINRQVTFSKRRNGLLKKAYELSVLCDAEVALIVFSSRGKLYEFGSVGVERTIERYHRCYNCSVTNNRPEESKQNWCQEVAKLKAKYESLVRTNRHLLGEDIGEMGVKQLQALERQLEAALTATRQRKTQVMMEEMEDLRKKERQLGDINKQLKIKFEAGGHAFKSFQDFWPNSAASMAGDPNNSKFPVQPSHPDSVDCNTEPFLQIGFQQHYYVQGEGSSVPKSNVACETNFVQDWFL

SEQ ID NO: 591 - protein, 294 aa, Triticum aestivum
  misc_feature (57)..(57): Xaa can be any naturally occurring amino acid
GFSLGPECPRSRRGRTRDARTEAPAAGAGKGKETASCFAKMGEPTGPDSKKCKIADXDREAQVEEEAATATASDGSAGGERGRKQAKGKGSKSKQPAADEPPRDYVHVRARRGQATDSHSLAERVRREKITLKMKMLQDLVPGCNKVIGKALMLDEIINYVQSLQQQVEFLSMKLSTVNPQLDFDTLSNLLHKDMNQALDPSASTVFPLESAGTVYPLCDQADLYQSFSSGAMENQCSMGLLDMALPHAPQYPFQKQQQDFWEASAQNGLHMDHEQSQENAGQLQAADHPEIEF

SEQ ID NO: 592 - protein, 386 aa, Arabidopsis thaliana
MKNSKCNLIDSKLEEHHHLCGSKHCPGCGRMIQAATKPNWVGLPAGVKFDPTDQELIEHLEAKVKGKEENKKWSSSHPLIDEFIPTIDGEDGICYTHPQKLPGVTRDGLSKHFFHKPSRAYTTGTRKRRKIIQTDHDSELTGSSETRWHKTGKTRPVMINGQQRGCKKILVLYTNFGKNRRPEKTNWVMHQYHLGINEEEREGELVVSKIFYQTQPRQCVSNTNWSDHHGSKDVIGIGVGDEISSVAATLQSLGSGDVVSRVNMHPHTRSFDEGTAEASKGRENQHVSGTCEEVHDGIITSSMSSHHMIHDHHNQHHQIGDRREFHMSSSYPMTPTITSQHESIFHVTSTMPFQGSVVWFGIRRPNYGLYHSYVYRRRKFLTNLCI

SEQ ID NO: 593 - protein, 487 aa, Oryza sativa (japonica cultivar-group)
MMLKDLAEIQQQQLLAAAEENMSNLTSASGDQASVSSHPAPPPAKKKRSLPGNPDPEAEVIALSPRTLMATNRYVCEICGKGFQRDQNLQLHRRGHNLPWKLKQRNPKEVVRKKVYVCPEAGCVHHDPARALGDLTGIKKHFSRKHGEKKWKCDKCSKRYAVHSDWKAHSKVCGTREYRCDCGTLFSRRDSFITHRAFCDALAEESARAVTAAAAVAGQQQHGGGMLFSQVADVLDHQAAMAMGGHGLMQELCLKREQQQQQQQFAPSWLTAQQQQQQLEAMAGAGNPAAMYGSARLDQEFIGSSTPESGGAQQAGLSFGFSSTSSAPPHPAASSAHMSATALLQKAAQMGATLSRPSSHAHMAAAAAASTHNSSSSAATTNAPPPPPTSNVSSTCVGAGGYGLAFEASHFIAADESSRGARSDRDTGNGVAGAGNDGLTRDFLGLRAFSHGNIMSMAGFDPCMSTTSASSAAPYDHHHHSNKPWHS

SEQ ID NO: 594 - protein, 212 aa, Brassica napus
  misc_feature (193)..(193): Xaa can be any naturally occurring amino acid
MASSQWTRSEDKMFEQALVLFPEGSPNRWERIADQLNKSAGEVREHYEALVHDVLEIDSGRVDVPDYMDDSAAGWDSAGQISFGSKHGEGERKRGTPWSENEHKLFLIGLKRYGKGDWRSISRNVVVTRTPTQVASHAQKYFLRQNSVKKERKRSSIHDITTVDTNLAMPGSNMAWPGQQESSQHQQQQSMSXEFGQELTPGGHYEEFGYRM

SEQ ID NO: 595 - protein, 241 aa, Medicago truncatula
MEKLNFVKNGVSKLPPGFCFQPTDEELVFHYLKCKIFSYQLPASIIPEINVCKFDPWDLPGNCGEQDKYFFSSKEAKYRNSNRMNRTTSSGYWKATGSDKKVSVSSSLSNGIAGIRKSLVFYQGKSPNGSRTHWIMHEYRLVSLGTTACNQLQNYANEIGNWVLCRIFTKKRSNIENGYMMKSNIVMNTNVEVAQPRFFDFMRVHNLASDPTTHFSISSSCSSSSEVSSSEERCSDIYTDF

SEQ ID NO: 596 - protein, 242 aa, Liriodendron tulipifera
MGRGRVELKRIENKINRQVTFAKRRNGLLKKAYELSVLCDAEVALIIFSNRGKLYEFCSTSSMFKTLERYQKCNYGAPEAAVTTREIQSSHQEYLKLKARVEALQRSQRNLLGEDLGPLNGKELDTLERQLDVSLKQIRSTRTQYMLDQLTDLQRREQMLSEANKALKRRLDEGMQANPHQGWNHNPHAMEYVRQQGPPQGDGFFHPLDCEPTLQIGYQTDQITMSTAPGPSLNNYMPGWLA

SEQ ID NO: 597 - protein, 297 aa, Oryza sativa (japonica cultivar-group)
MDDGDLDFSNPDTFLCPAVGGADPDGSCSMDSYFDDILKDTEHHACTHTHTCNPPVHDLSHTHTCVHVHTKIVSAPSDTPSDAAETAESPTENNASKKRPSGNRAAVRKYREKKKAHTASLEEEVVHLRALNQQLMKKLQNHATLEAEVSRLRCLLVDIRGRIEGEIGAFPYQRPVKNIDLVSSVDQGSYLGGAQVMNSCDFRCADQMYCSPGMQVRTMGEDGAVSGQVLGQGACDIASIQCQGAKSGSAKLPVCGAMEHGYYGIPKAVRRCQGVRRPLRLTRKLEEKGQKQVINPS

SEQ ID NO: 598 - protein, 291 aa, Zea mays
MASQGVVGGGGGGGGGGRHRFFKVLLPGSFEISLSLPPKFAAGLGVLCPAWRAAAKLRDRTGRSWDVELRRDAGHHRVSFTGGGWRGFVSANALSAGQLLVFEHRGCLDFAVDRFDASGCCCDDDQDGGGVVVAEHMATTTTTGTEATADKESGCSGQEAAAAVKRRRRSPLSTTTTVCGGDDNDETLCRRIERAYQLRFLDLSKDFCDRVGWSSSRQVVLCAAGDSGKRWQVSVKVSAKSGMMCAGWAEFAQDNGLTVSDACEFVPPPLHAHGSGSDVLQVHLVRGGGTS

SEQ ID NO: 599 - protein, 851 aa, Oryza sativa
MAPPPPPQGSSTGDPLYDELWHACAGPLVTVPRVGDLVFYFPQGHIEQVEASMNQVADSQMRLYDLPSKLLCRVLNVELKAEQDTDEVYAQVMLMPEPEQNEMAVEKTTPTSGPVQARPPVRSFCKTLTASDTSTHGGFSVLRRHADECLPPLDMTQSPPTQELVAKDLHSMDWRFRHIFRGQPRRHLLQSGWSVFVSSKRLVAGDAFIFLRGENGELRVGVRRAMRQLSNVPSSVISSQSMHLGVLATAWHAINTKSMFTVYYKPRTSPSEFIIPYDQYMESVKNNYSVGMRFRMRFEGEEAPEQRFTGTIIGSENLDPVWPESSWRSLKVRWDEPSTIPRPDRVSPWKIEPASSPPVNPLPLSRVKRPRPNAPPASPESPILTKEAATKVDTDPAQAQRSQNSTVLQGQEQMTLRSNLTESNDSDVTAHKPMMWSPSPNAAKAHPLTFQQRPPMDNWMQLGRRETDFKDVRSGSQSFGDSPGFFMQNFDEAPNRLTSFKNQFQDQGSARHFSDPYYYVSPQPSLTVESSTQMHTDSKELHFWNGQSTVYGNSRDRPQNFRFEQNSSSWLNQSFARPEQPRVIRPHASIAPVELEKTEGSGFKIFGFKVDTTNAPNNHLSSPMAATHEPMLQTPSSLNQLQPVQTDCIPEVSVSTAGTATENEKSGQQAQQSSKDVQSKTQVASTRSCTKHMKFFLLVVDMLKFSFCKFLAKSQFYPLCGMVHKQGVALGRSVDLSKFSNYDELKAELDKMFEFDGELVSSNKNWQIVYTDNEGDMMLVGDDPWEEFCSIVRKIYIYTKEEVQKMNSKSNAPRKDDSSENEKGHLPMPNKSDNYVCLLNCLIWINLFNCR

SEQ ID NO: 600 - protein, 859 aa, Arabidopsis thaliana
MASSEVSMKGNRGGDNFSSSGFSDPKETRNVSVAGEGQKSNSTRSAAAERALDPEAALYRELWHACAGPLVTVPRQDDRVFYFPQGHIEQVEASTNQAAEQQMPLYDLPSKLLCRVINVDLKAEADTDEVYAQITLLPEANQDENAIEKEAPLPPPPRFQVHSFCKTLTASDTSTHGGFSVLRRHADECLPPLDMSRQPPTQELVAKDLHANEWRFRHIFRGQPRRHLLQSGWSVFVSSKRLVAGDAFIFLRGENGELRVGVRRAMRQQGNVPSSVISSHSMHLGVLATAWHAISTGTMFTVYYKPRTSPSEFIVPFDQYMESVKNNYSIGMRFKMRFEGEEAPEQRFTGTIVGIEESDPTRWPKSKWRSLKVRWDETSSIPRPDRVSPWKVEPALAPPALSPVPMPRPKRPRSNIAPSSPDSSMLTREGTTKANMDPLPASGLSRVLQGQEYSTLRTKHTESVECDAPENSVVWQSSADDDKVDVVSGSRRYGSENWMSSARHEPTYTDLLSGFGTNIDPSHGQRIPFYDHSSSPSMPAKRILSDSEGKFDYLANQWQMIHSGLSLKLHESPKVPAATDASLQGRCNVKYSEYPVLNGLSTENAGGNWPIRPRALNYYEEVVNAQAQAQAREQVTKQPFTIQEETAKSREGNCRLFGIPLTNNMNGTDSTMSQRNNLNDAAGLTQIASPKVQDLSDQSKGSKSTNDHREQGRPFQTNNPHPKDAQTKTNSSRSCTKVHKQGIALGRSVDLSKFQNYEELVAELDRLFEFNGELMAPKKDWLIVYTDEENDMMLVGDDPWQEFCCMVRKIFIYTKEEVRKMNPGTLSCRSEEEAVVGEGSDAKDAKSASNPSLSSAGNS

SEQ ID NO: 601 - protein, 352 aa, Arabidopsis thaliana
MGRPPCCEKIGVKKGPWTPEEDIILVSYIQEHGPGNWRSVPTHTGLRRCSKSCRLRWTNYLRPGIKRGNFTEHEEKTIVHLQALLGNRWAAIASYLPERTDNDIKNYWNTHLKKKLKKINESGEEDNDGVSSSNTSSQKNHQSTNKGQWERRLQTDINMAKQALCEALSLDKPSSTLSSSSSLPTPVITQQNIRNFSSALLDRCYDPSSSSSSTTTTTTSNTTNPYPSGVYASSAENIARLLQDFMKDTPKALTLSSSSPVSETGPLTAAVSEEGGEGFEQSFFSFNSMDETQNLTQETSFFHDQVIKPEITMDQDHGLISQGSLSLFEKWLFDEQSHEMVGMALAGQEGMF

SEQ ID NO: 602 - protein, 431 aa, Zea mays
MNRAHSSSSKLINEKLVEHRISTAKHCPHCGEKIDSKPDWVGLPAGVKFDPTDQELIEHLEAKVKDEGSRSHPLIDEFIPTIDGEDGICYTHPEKLPGVTRDGLSKHFFHRPSKAYTTGTRKRRKIQTECDVHKGETRWHKTGKTRPVMVNGRQKGCKKILVLYTNFGKHRKPEKTNWVMHQYHLGDLEEEKEGELVVCKIFYQTQPRQCSWSSDRGAAATALAATAAAAAAQEQHRRDSGSGSCSSRDHEVSATSFPAGYTVTTAVEMQQHMKQPADHFSFAPFRKTFDQEVGIGGDQVPSNQLGRSEPHHAGLGQQPHGPVLATKTAVPATAFLISRPSNPVSTIVPPAMQHASVVLDHDQFHVPAILLHHHDKFQPQQKLDRRSAGLEELIMGCTSSTSTKGDASIAHPQETEWPYTYWPPDNQDHHG

SEQ ID NO: 603 - protein, 234 aa, Glycine soja
MFTLNHSSDLYHVSPELSSSLDTSSPASEGSRGVAFSDEEVRLAVRHPKKRAGRKKFRETRHPVYRGVRRRNSDKWVCEVREPNKKTRIWLGTFPTPEMAARAHDVAAMALRGRYACLNFADSAWRLPVPATAEAKDIQKAAAEAAQAFRPDQTLKNANTRQECVEAVAVAVADTTTATAQGVFYMEEEEQVLDMPELLRNMVLMSPTHCLGYEYEDADLDAQDAEVSLWNFSI

SEQ ID NO: 604 - protein, 241 aa, Cucumis sativus
LERRMWRDKMRLKRLKEQSKVKEGIDIVKQRQSQDQARRKKMSRAHDGILKYMLKIMEVCNAQGFVYGIIPEKGKPVTGASDNLREWWKDKVRFDRNGPAAIAKYQADNAIPGRNDGCNSIGPTPHTLQELQDTTLGSLLSALMQHCDPPQRRFPLEKGVPPPWWPTGVEEWWPQLGLPKDQGPPPYKKPHDLKKAWKVGVLTAVIKHMSPDIAKIRKLVRQSKCLQDKMTAKESATWLAI

SEQ ID NO: 605 - protein, 396 aa, Oryza sativa
MCGGAIISGFIPPSAAAAAAAAAAKKQQGRRVTADVLWPGMLRKGKAAAAEEDFEADFREFERGMSDDEAEGGGGEEEEDDDDVVVVVPPPAAARFVVRAAAKAAPPTADGMLTTKLVQHDGPTARSAKHKRKNQYRGIRQRPWGKWAAEIRDPSKGVRVWLGTYNTAEEAARAYDAEARKIRGKKAKVNFPDEPAVAQKLSLKQNAAKQEKLAPPLKTCGDDAFFQLNSSDNDLFAMLAKVPAKPAEPVDLMPPVKPLASTETFEMNMLSDTSSNSFGSSDFGWEDDTLTPDYTSVFVPNAAMPAYGEPAYLTGGAPKRMRNNYGIAVPQGNGMPNLAQNMPTFDPEMKYLPLPYVESSSDESMDNLLQNDATQDGASNEGIWSLDELLMAAGAY

SEQ ID NO: 606 - protein, 467 aa, Oryza sativa
  misc_feature (369)..(369): Xaa can be any naturally occurring amino acid
  misc_feature (383)..(383): Xaa can be any naturally occurring amino acid
  misc_feature (399)..(399): Xaa can be any naturally occurring amino acid
  misc_feature (414)..(414): Xaa can be any naturally occurring amino acid
  misc_feature (427)..(427): Xaa can be any naturally occurring amino acid
MSFRSIVRDVRDSFGSLSRRSFEVRISGLPGLSGHHRGKSLGSLSELRDRPVVVDQSRWVGLPPELLRDVMKRLEEGESNWPSRKDVVACAAVCRTWREICKDIVQSPEICGKLTFPVSLKQPGPRDGLIQCFIKRDKSKLTYYLYLCLSPAVLSENGKFLLAAKRNRRATSTEYIISVDSKNISRSSNGYVGKMRSNFLGTKFVVYDTQPPYNAGSLMSCQHGSRRISSRRVSPKLPTGSYPIAHVKYELNVLGTRGPRRMQCTMHSIPASAVDPEGVVPGQPEQLLPGPFEESFRSTNTSSRFSFMDRSLDFSSSRFSEISGSANQQGEDDIPEAKERPLVLRNKVPRWHEQLQCLCLNFRGPVTLXSVKNFQLIAAAAFXSSQLEQQQNHASSSFXAFDHGKVILQFGKVXQDMSPLDYRSPFXTFQGFAICLTAFNQTCLGIHTSALFIVCLFTLPRVVYSLP

SEQ ID NO: 607 - protein, 199 aa, Arabidopsis thaliana
MVQTKKFRGVRQRHWGSWVAEIRHPLLKRRIWLGTFETAEEAARAYDEAAVLMSGRNAKTNFPLNNNNTGETSEGKTDISASSTMSSSTSSSSLSSILSAKLRKCCKSPSPSLTCLRLDTASSHIGVWQKRAGSKSDSSWVMTVELGPASSSQETTSKASQDAILAPTTEVEIGGSREEVLDEEEKVALQMIEELLNTN

SEQ ID NO: 608 - protein, 434 aa, Pinus taeda
MERLNTAAAQASSSLYGVNMAEYGDAGVSSMMGLITQHEPEQSENIMSTRIPSSFSSFHGHADCLLSAAMFQGSQGDHKLNPQPGMNQQLVSEQSIMSDSSMPLVKTKACSGLRNQFEFHREQPGNCYTDQSSNIPLSPIVTSLASQARGEARMIPSLDANSAHFNVDNEEHAIKSKILAHPQYPSLLGAYIDCQKIGAPPEAVARLDALTREHQDPQRRTVSIGMDPELDQFMEAYCEILTKYHEELAKPFKEAMLFLKKIETQFNSLGKGTIRISSPADDDEKTEGGGSSEEVEDGSGGETDFQEVDHHAVEDRELKNHLLRKYCGYLSSLKQEFMKKKKKGKLPKDARQKLLDWWSLHDKWPYPSETEKIALAECTGLDQKQINNWFINQRKRHWKPSEDMHFMVMNSHSPHSAALYVERHMMTEGYHLDC

SEQ ID NO: 609 - protein, 338 aa, Brassica rapa subsp. pekinensis
MGRSPSSDDSGLKKGPWTPEEDEKLVNYVQKHGHSSWRALPKLAGLNRCGKSCRLRWTNYLRPDIKRGKFSPDEEQTILNLHAVLGNKWSTIANHLPGRTDNEIKNFWNTHLKKKLIQMGIDPMTHLPRTDIFSSLSQLMSLSSNLRGFVDMQQQFPNGQDQTILKLQTEMAKLQLFQYLLQPPTMSNNIRNPNDFDILSLLNSIASFKEITSNNLDLGSNLQDFNSLPSLKTLNSNIGPSSVLPQIPEDNHFKFCRIERENLPVSPIWLSDPTNSNQHMLPSLDPSSAVSDDMIRNQYVIEHVNSNLTSSSQESGASASAAWPDHLLDDSIFSDMIP

SEQ ID NO: 610 - protein, 366 aa, Capillipedium parviflorum
PSVKHMFPFCDSSSPMDLPLYQQLQLSPPSPKPDQSGSFYCYPCSPPFAAAAAEASFHLSYQIGSAAAATPPQAVIDSPDLPVKPLMEQAPAPATELAACASGAQGAGVSLGLDGAPAAARKDRHSKICTAGGMRDRRMRLPLDTARRFFRLQDMLGFDKPSNTIEWLLREAGLAIQALNMANDVDASSECVEDGSSSLSVDAKQHNPAEQLGGGGDQKPKGNGRSERKKPAKSRKTATTPKPPRKSGNNAHPVPNKETRAKARERARERTEEKHRMRWVKLASAIDVEAAAATSVASDRPCSNHLSHHHHHHSSSSSSMNMPRAAVADELQERERCSSSALNNRGRTMQEITGASDVVLGFGNGG

SEQ ID NO: 611 - protein, 429 aa, Pinus taeda
MEHLNAAAAQASSSLYGVSMSEYGDVGVSSMMALMTQHEPHESESTMTTSMPSSFSSFHGHAECLLSAAMFQASQGDHKLKRQHGMDQLVSEQAVMSDSSMPSVKTEGCSSLRNQFEIRREQSGNCYADQSSNAPLVTSIASQAGGVAARMITSLEADSPHFNEADAIKSKILAHPQYPNLLGAYIDCQKIGAPPEVASRLDALSHEYENQQHRSSLSIGMDPELDQFMEAYCEMLTKYHEELTKPFKEAMSFLKKIEAQLNSLGKGTIRISPSAENDEKTEGGASSEEVEDGSGGETDFQEVDHHAVEDRELKDHLLRKYSGYLSSLKQEFMKKKKKGKLPKDARQKLLDWWTVHYKWPYPSETEKIALAECTGLDQKQINNWFINQRKRHWKPSEDMQLMAMDGQSPHGATMYVERHLMTEGYHLDC

SEQ ID NO: 612 - protein, 345 aa, Danthoniopsis dinteri
PSVKHMFPFSDSSSPMDLPLYHQLQLSPPSPKPDQSSSSFFYYPCSPPFAAADASFHLGCQVAAATPPQDVIESPDLPEHPAVMEQAPKPKPDAGNAQGAGGSVDRSAAAAARKDRHSKICTAGGMRDRRMRLSLDVARKFFALQDMLGFDKASKTVQWLLNTSKAAIQEIMTDDASSECAEDGSSSLSVDGKHNPPAELQPEGDQQPKASGGGRSEGKKPARARKAAATPKPPRKSGSAHPVVPDKETRAKARERARERTREKHRMRWVKLASAIDVEAAAASAARDRPSSSNLIHQHSSSMSMPSAAAELEERCSSSTLNNNGGRMQEISEASDVMLAFGNGG

SEQ ID NO: 613 - protein, 470 aa, Pinus taeda
MEHMNTTAQSSSSLYGVHMVEYGGDVGVGSMMALMTEHHPESESIMTSIPIPSSYSSYSHGHGHGHGHGHGHGQSECLLSAAAMFQTSRPCQGSNKFEPANAHIGGGGGGGRGAGHFVMEQFIPEQAVISDSSISSVKTEVCSGSGGQFELIRRKEEGRCGRAYAEPSFVVTPLVTSLPPQQQEGRMVTSLAVDMDSSCSCKPNEADAMRAKIIAHVHYPRLVAAYIDCQKVGAPPEVVLELDDLSHKCQTQHCVPTISVGADPELDQFMEAYCEMFIKYQEELTKPFKEAMAFLKKIENQLGTLTKGTIRTSSLDQGDERGDGAASSEEEDGSGGEVEFHEVDPHAEDRELKDQLLRKYSGYLSSLKQEFLKKKKKGKLPKEARQKLLDWWTRNYKWPYPSESQKIALAESTGLDQKQINNWFINQRKRHWKPSEEMQFVVMDSPNPHNAAFFLEGHLRTDGTAFSMDC

SEQ ID NO: 614 - protein, 163 aa, Brassica napus
LVTGTTVTTTTTESTRSVGLAAESTRSMVLVDSQENGVRLVHALMACAEAIQNNDLSIAEALVKQIGFLAVSQAGAMRKVATYFAEALARRIYRLSPPQTQIDHSLFDTLQMHFYETCPYLKVAHFTANQAILEAFEGKKRVHVIDFSMNQGLQWPALMQALA

SEQ ID NO: 615 - protein, 438 aa, Picea mariana
MEDMNMNIGGAATFYGVNMNEYGDTGVGSMMALMTEQEPGNESIMSTMTMTIPSSAFSSYSHAGQVEGLLSAAAATMFNQGGHHHHQKHLVGGHFPPEQLVMNEQAAVISDSSLSSVKTEVCSNQLEFHRKTSGGGRSCCPQPSLVVRAPQQQQQHHHHQEASRMVTSLEVDIDSACSSNPNDSIDTLKTKIACHPHYPQLLAAYMDCQKIGAPPEVVTVLDEISQENQLGRHLATMDIGVDPELDQFMEAYCQMLIKYHLELSKPFKEARTFLNKMETQLNCLSKGAIRSFPSGYCDEREDGGGSSEEEFSCGEIEVHEVDPRAEDRELKDQLLRKYSGYFSSLKQEFLKKKKKGKLPKEARQKLLEWWNVHYKWPYPSETDKVSLAESTGLDQKQINNWFINQRKRHWKPSEDMQFVVMDSLNPHGASFYMDGADC

SEQ ID NO: 616 - protein, 363 aa, Selaginella kraussiana
  misc_feature (282)..(282): Xaa can be any naturally occurring amino acid
MGGDQEQQARQHNNDDREAAAKQMPTWLLSSRQQPPPSAQCDEEAWSSHHHHQQQQASSSSYENPRTTTQGLLQDDDKAEHGLGVGSGDMVEECARMQSAKLKADIVTHPLYEQLLEAHVSCLRIATPVDQLGKIDGQIAQCHQLIAKYYILANHQLLCGNSKDELDQFMAHYVMLLRSFKDQLQHHVRVHAKEAVMACWELEQSLLGLTGVSPGEGSGATMSDDETTEQEQQCESDLWQDNLGFGPLIPTETERTLMERVRQELKHELKHGYRARIVDVRXEILRKRRAGKLPGDTTSVLKAWWHAHSKWPYPTEDEKARLVQETGLELKQINNWFINQRKRNWHHHPSSSASTTSKLKCKS

SEQ ID NO: 617 - protein, 392 aa, Oryza sativa (japonica cultivar-group)
MPSYAHHHSSLGDDEEENGRFLSLCLLGFWNFGNLWFLLCVYVGAFWTEKDGKMDALKSSCRSEEAADEGAAAAPSAWGMVERDGFSVEDLLDLEEFCEAEKDAAEENEQALALVAAPEEEKSKDDSQPSSVVTYELVAPPPPPPEIVDLPAHDVEELEWVSRIMDDSLSELPPPPQPPASVVASLAARPPQPRQLQRRPQDGAYRALPPASYPVRTPTICALSTEALVPVKAKRSKRSRATAWSLSGAPPFSDSTSSSSTTTTSSCSSSASFSSFSPLLKFEWHPLGGTSDLPDDHLLPPGEEVQARHCGVQKTPQWRAGPEGAKTLCNACGVRYKSGRLLPEYRPACSPTFVSAIHSNSHRKVLEMRRKKEVGSGLLTAAAAAAPAVASF

SEQ ID NO: 618 - protein, 338 aa, Solanum tuberosum
VYCRADSAYLCADCDARIHAASLMASRHERVWVCEACERAPAAFLCKADAASLCASCDADIHSANPLARRHHRVPIMPIPGTLYGPPAVHTVSGGSMMIGGTTGEGTEDDGFLSLTQDADDTTIDEEDENEAASWLLLNPPVKNNNKNNINNNNNNQNNNYGMLFGGEVVDEYLDLAEYGGDSQFNDQYSVNQQQQHYSVPQKSYVEDSVVPVQNGQRKSLILYHQPQQQQQQQQQSHHLNFQLGMEYDNSNTGYGYPASLSHSVSISSMDVSVVPESALSETSNSHPRPPKGTIDLFSGPPIQIPPQLTPMDREARVLRYREKKKNRKFEKTIRYAS

SEQ ID NO: 619 - protein, 490 aa, Oryza sativa
MAALRQGDDPAIKLFGRTIPLLLDPPAAAAAAADEVMPNLGNGVKTNNDLPLVSDKLLIVKGIPFCPNNSKKNDLQGISRPDGRIEIDSMTEDVKTEPDGSVPEKILKKPDKILPCPRCNSMETKFCYFNNYNVHQPRHFCRNCQRYWTAGGAMRNVPVGAGRRRNKHVSKYCQAMMTCNNTVAPGDVSDVVHHQVITHGSSLLPATLKENETPTEFISEVPPCKSSASILDIGEPNDTDLVPLASGDNKEEKSCASSVVVSSCSENLMPDNAIMKEPNNRSGCCNGVALPFPTGPALVLPWSLGWNSVALMPATQCSMQPVLGLKDGIPCPPSWPPQLMVPAPGICTPVVPIPLVPPLWSCFPGWPNGMWNAQCPGGNTTVLPSTAPNKISCSGSSSLVLGKHSREESLQEEEKTRNYLWVPKTLRIDDPAEAAKSSIWATLGIKPDDKGIFKSFQPNVAKNGTAPESPQALQANPAAFSRSQSFQETT

SEQ ID NO: 620 - protein, 333 aa, Solanum demissum
VYCWADSTFLCAGCDARMHSANLLASRHERVWVCEACGRAPAAFLCKADAASLCASCDADIHSANPLARRHHRVPIMPVLGTLYGPPAVETVGSGSMMIGGPTGESTEDYGFLSFTQNADDMTVDEEDEDEAASWLLLNPPVKKNNKNFDNDHNNQNNNYGMLFGREVVDDYLDLAEYGGVSQFNDQYSVNQQQQHYSVPQKSYRGDSVVPVQEGQGKSLILYHQQQQQQQSHHLNFQLGMEYDNYNTRYGYPATMSHSVSISSMDVSVVPESALSETSNSHPRPPKGNIGLFSGPPIQIPPQLTPMNREARVLRYREKKKNRKFEKTIRYAS

SEQ ID NO: 621 - protein, 882 aa, Zea mays
  misc_feature (788)..(788): Xaa can be any naturally occurring amino acid
  misc_feature (802)..(802): Xaa can be any naturally occurring amino acid
MTSSAAAAAAAAQVAGGGGGGEGDAAAAARGGGGTEDGMYTELWNLCAGPLVTVPRVGDKVYYFPQGHIEQVEASTNQVAEQHMQFYDLPWKILCEVMNVELKAEPDNDEVYAQLTLLPESKQPEENGSSEEMPASPPAALARPRVHSFCKTLTASDTSTHGGFSVLRRHADECLPPLDMTRQPPTQELVAKDLHGVEWRFRHIFRGQPRRHLLQSGWSVFVSAKRLVAGDAFIFLRGDSGELRVGVRRAMRQQANVPSSVISSHSMHLGVLATAWHAVNTGTMFTVYYKPRTSPAEFVVPCDRYMESLKRNYPIGMRFKMRFEGEEAPEQRFTGTIVGNVDPDQAGWAESKWRYLKVRWDEASSIPRPERVSPWQIEPAVSPPPINPLPVHRPKRPRSNAVASLPESSAPTKEAAPKVTLETQQHALQRPLQTQDNVAPKSVFGDNSELDSAHKSSLRPSGFDLDKSTIGMQRKLGSDIWMRMNRPDGYSEMLSGYQPPNEGARNSQGFCSLPDQIAAGRPNFWHTVNAHYQDQQGNHNLFPGSWSMMPSSTGFGMNRQSYPMIQEVGGMSQSCTNTKFGNGVYAALPGRGIDRYPSGWFGHTTPGGRVDDAQPRVIKPQPLVLAHGEALKMKGNSCKLFGIHLDSPAKSEPLKSPPSVATPAAEKWMADGIDADKSPEPHKTPKQLGATQTQVDPVPERCPQASRGTQCKSQGGSTRSCKKVHKQGMALGRSVDLTKFNGYTELVAELDEMFDFNGELKGCSKEWMVVYTDYEGDMMLVGDDPWKXVTSSSSRTSVVLSXKPLMCCARRPGCVGSEFCSMVHKIFVYTREEVQRMNPGALNSRPEDSGLANSTERGSASTAAAREAPGYQSASSLNSDNC

SEQ ID NO: 622 - protein, 307 aa, Capsicum annuum
MIKGIVGNQQLGLPAGFRFHPTDEELVQHYLCRKCAGQSISVSIIAEIDLYKFDPWQLPEKALYGEKEWYFFSQEDRKYPNGSRPNRAAGTGYWKATGADKPVGKPKTLGIKKALVFYAGKAPRGIKTNWIMHEYRLANVDRSAGKSNNLRLDDWVLCRIYNKKGHTLRSITMWASKRGESFGEFEDEIKPKIFPTQLAPAPGQWPPRPQSTPASDYFNFETSESMTTTRMHTTNSSSGSEHVLSSCDKEVQSAPKWDDLGTAALDFQINYLDGLLNDPFEIQMQQQNCNIDQFNTFQDMFLYMQKP

SEQ ID NO: 623 - protein, 498 aa, Oryza sativa
MGRHACSAAGVQQKLRKGLWSPEEDEKLYNHIYRYGVGCWSSVPKLAGLQRCGKSCRLRWINYLRPDLKRGSFSQQEEDAIVGLHEILGNRWSQIASHLPGRTDNEIKNFWNSCLKKKLRQRGIDPSTHQPISTAAAAAAAALDTSTQDQKPPATADGFALKQQQQVFDPFPVIDSFGSGFDATGMPLYGHLGGKDAAGFVDYSSVLDVSENLGYGESSSNSSNWNCGVGAPEVNNALESEPLHWATESKVEPFVGYGEGDAMEHKFGLPCHGQQEQGMTHFDFDVSRSMVVGDFNFDRGNGPPAKMQKKKTNKKIAARGSPPPPSPAGSERGGEPLPSSSSSPPPRAFVAVAAPAGLPHPSSGQICEGGRGDAADRLAQSSPPSPPPASPLPPPARSGREGGREPPPSPPPASPSLLRPDLRGRGRGAAAARTALPTLHTVAAAAGLPPPSSGQIWEGGGRGAAAATARTSTTAALRRHRPPPPPGRVEADHLSGAT

SEQ ID NO: 624 - protein, 596 aa, Arabidopsis thaliana
  misc_feature (425)..(425): Xaa can be any naturally occurring amino acid
  misc_feature (573)..(573): Xaa can be any naturally occurring amino acid
MTVEQNLEALDQFPVGMRVLAVDDDQTCLKILESLLRHCQYHVTTTNQAQKALELLRENKNKFDLVISDVDMPDMDGFKLLELVGLEMDLPVIMLSAHSDPKYVMKGVTHGACDYLLKPVRIEELKNIWQHVVRSRFDKNRGSNNNGDKRDGSGNEGVGNSDPNNGKGNRKRKDQYNEDEDEDRDDNDDSCAQKKQRVVWTVELHKKFVAAVNQLGYEKAMPKKILDLMNVEKLTRENVASHLQKFRLYLKRISGVANQQAIMANSELHFMQMNGLDGFHHRPIPVGSGQYHGGAPAMRSFPPNGILGRLNTPSGIGVRSLSSPPAGMFLQNQTDIGKFHHVSSLPLNHSDGGNILQGLPMPLEFDQLQTNNNKSRNMNSNKSIAGTSMAFPSFSTQQNSLISAPNNNVVVLEGHPQATPPGFPXHQINKRLEHWSNAVSSSTHPPPPAHNSNSINHQFDVSPLPHSRPDPLEWNNVSSSYSIPFCDSANTLSSPALDTTNPRAFCRNTDFDSNTNVQPGVFYGPSTDAMALLSSSNPKEGFVVGQQKLQSGGFMVADAGSLDDIVNSPMKQXEAREICLEEIWDMEGLVPSEHAY

SEQ ID NO: 625 - protein, 263 aa, Festuca arundinacea
MSRKKKVRRRSTGPDSVSEIIKKWKEQNQKLQEENGARKAPAKGSKKGCMAGKGGPENSNCKYRGVRQRTWGKWVAEIREPNRGNRLWLGSFPTAVEAAHAYDEAARAMYGATARVNFSERSLDANSGCTSAPPVLMSNGPTAVSHPADGKDESESPSLRSDGPTATLRRSDAKDEPESAGTVVHEVKTEVSNDSTSVREERKTVEVFQPKGKALHKEEKVSYDYFNVEEVLDMIIVELSADRKMEVHEEYQDGDDGFSLFSY

SEQ ID NO: 626 - protein, 124 aa, Brassica napus
  misc_feature (77)..(78): Xaa can be any naturally occurring amino acid
PGPTTPVRKNLLAERRRRINFNDGLNMLRSVVPKISKMVGASILGDAIDILRELFQRINDLNTELESTPTGSLLPTXXSFHPLTPTPKTFFCRVKEKLCPFFLPSPKGQQARVEVRLREGRALN

SEQ ID NO: 627 - protein, 177 aa, Glycine max
MAESDNESGGHTGNASGSNELSGCREQDRFLPIANVSRIMKKALPANAKISKEAKETVQECVSEFISFITGEASDKCQKEKRKTINGDDLLWAMTTLGFEDYVDPLKIYLHKYREMEGEKTAMMGRPHERDEGYGHGHGHATPMMTMMMGHQPQHQHQHQHQGHVYGSGSASSARTR

SEQ ID NO: 628 - protein, 532 aa, Oryza sativa
MGMSPEPCNSISDCSQQQSHHLTLTQQQDSTIICTNQELDYYYRFYDVDEAAFDGNEVELVSRFSKVTRMDHMISSPYQPTWSPAQAAVDVVGSSETSRVRKKRFWDVLESCKQKVEAMEAMDTPATATFRVGAGDGGGGGGGGAGGGGGGADGMRLVQLLVACAEAVACRDRAQAAALLRELQAGAPVHGTAFQRVASCFVQGLADRLPLAHPPALGPASMAFCIPPSSCAGRDGARGEALALAYELCPYLRFAHFVANACMLEAFEGESNVHVVDLGMTLGLDRGHQWRGLLDGLAARASGKPARVRVTGVGARMDTMRAIGRELEAYAEGLGMYLEFRGINRGLESLHIDDLGVDADEAVAINSVLELHSVVKESRGALNSVLQTIRKLSPRAFVLVEQDAGHNGPFFLGRFMEALHYYAALFDALDAALPRYDARRARVEQFHFGAEIRNVVGCEGAARVERHERADQWRRRMSRAGFQSVPIKMAAKAREWLDENAGGGGYTVAEEKGCLVLGWKGKPVIAASCWKC

SEQ ID NO: 629 - protein, 421 aa, Physcomitrella patens
MGRKPCCEKVGLRRGPWTSEEDQKLVSHITNNGLSCWRAIPKLAGLLRCGKSCRLRWTNYLRPDLKRGIFSEAEENLILDLHATLGNRWSRIAAQLPGRTDNEIKNYWNTRLKKRLRSQGLDPNTHLPLEDSKLDDTEDDTDDEGGDSSDVTMSDASKSEKRSKKKSKPKETVKVRQPKGPKPAPQLKMCQSDEGPVLLKVPKAPKSPISVNPGPGCNYDDDSEHSSSSTVTTKSHEDHRDSSDFIKALTSVSSFPEAELWSCIKPITNSFSSTALLSEWDSYRAFDSSLFPSSYPQLNSGLPKLEDVNSKSSAVASPVQGMLPAYNPMGMEMQTRMQFSSQLTHEIGQNYGGIFQETCYPQPDMGMSWSMHAELSHCGTESLFATPNPANAPSNFEEVPQPSPCTTSQELQRLAALLDLI

SEQ ID NO: 630 - protein, 366 aa, Bothriochloa odorata
PSVKHMFPFCDSSSPMDLPLYQQLQLSPPSPKPDQSGSFYCYPCSPPFAAAAADASFHLSYQIGSAAAATPPQAVIDSPDLPVKPLVEQAPAPATELAVCASGAQGAGVSLGLDGAPAAARKDRHSKICTAGGMRDRRMRLPLDTARRFFRLQDMLGFDKPSNTIEWLLREAGLAIQALNMANDVDASSECVEDGSSSLSVDAKQHNPAEQLGGGGDQKPKGNGRSERKKPAKSRKTATTPKPPRKSGNNAHPVPNKETRAKARERARERTEEKHRMRWVKLASAIDVEAAAATSVASDRPCSNHLSHHHHHHSSSSSSMNMPRAAAADELQERERCSSSALNNRGRTMQEITGASDVVLGFGNGG

SEQ ID NO: 631 - protein, 242 aa, Syringa vulgaris
  misc_feature (188)..(188): Xaa can be any naturally occurring amino acid
LVQLRRMENKINRQVTFSKRRNGLLKKAYELSVLCDAEVGLIIFSSRGKLYEFGSAGMTATLERYQRCCFNPQNAGAGAERETQSWYQEVSKLKAKYESLQRTQRHLLGEDLGPLNVKELENLEKQLEGSLSQARQRKTKIMMEQMEDLRRKERQLGEMNKQLKIRVSLELSSHETEGQGLRGFPCQXNAAASAGTSNFMAQPGTNPMEFEPEPVLQMGYHHYNLGEGPLFQDHGYRSFDLF

SEQ ID NO: 632 - protein, 241 aa, Tradescantia virginiana
  misc_feature (228)..(228): Xaa can be any naturally occurring amino acid
VQLKRMENKINRQVTFSKRRGGLLKKAHEISILCDAEIALIIFSTKGKLYEYATNSKMDNILERYERYSYAEKALTSSDPDIQGNWCQEYAKLKSKVEALCKSQRHLMGEQLETLNLKELQQLEQQLEGSLKHVRSRKTQVMLDSISELQRKEKSLEEQNKNLEKEILEKQKIKALAQQAHWEHQNQPAPRGSPPRPFVIAESHPTLNIGHFQGRTNAVEAEENQQPXMRICSSLLPPWML

SEQ ID NO: 633 - protein, 222 aa, Tradescantia virginiana
  misc_feature (11)..(11): Xaa can be any naturally occurring amino acid
  misc_feature (218)..(218): Xaa can be any naturally occurring amino acid
  misc_feature (221)..(221): Xaa can be any naturally occurring amino acid
GLVKKAHEISXLCDAEVALIIFSTKGKLYEYATDSKMENILERYERYSYAEKALTSSDPELQGNWCQEYVKLKAKVEALHKSQRHLMGEQLEALDLKELQQLEHQLEGSLRLVRSRKTQMMLDSISELQRKEKSLEEQNKNLEKEILEKQKEKALAHQAHWEQQNQPLQSTNSPPRPFVIAETHPTLNIGNFQGRTNTVHAEESLQRQMRISSSLLPXWMXH

SEQ ID NO: 634 - protein, 422 aa, Nicotiana tabacum
MAYNPNHMSQEMDMHHFSDENSAVLRSILPEQLAQSSPDVKPLDHQQPPTWLNSAILRQESHYTGTGGRGVGENFLNLHSNSESSAAASQASNQWLSRSILRRNVSDVQTSNNSSAVIAAADLKNDDGNNNNDNGNNNAGGQLTDSEVVGGGGTDGILNWQNAGYKAEILAHPLFEQLLSAHVACLRIATPVDQLPRIDAQLAQSQQVVAKYSTLGQNIGDDKELDQFLTHYVLLLCPFKEQLQQHVRVHAMEAVMACWEIEQSLQSLTGVSPGEGTGATMSDDEDDQVDSEANLFDGSLDGHDGMAFGLPTESERSLMERVRQELKHDLKQGYKEKLVDIREEILRKRRAGKLPGDTTSVLKAWWQSHAKWPYPTEEDKAKLVQETGLQLKQINNWFINQRKRDWHSNASSSTTSKSKRKR

SEQ ID NO: 635 - protein, 440 aa, Zea mays
MNRAHSSSSKLINEKLVEHRISTAKHCPHCGEKIDSKPDWVGLPAGVKFDPTDQELIEHLEAKVKDEGSRSHPLIDEFIPTIDGEDGICYTHPEKLPGVTRDGLSKHFFHRPSKAYTTGTRKRRKIQTECDVHKGETRWHKTGKTRPVMVNGRQKGCKKILVLYTNFGKHRKPEKTNWVMHQYHLGDLEEEKEGELVVCKIFYQTQPRQCSWSSDRGAAATALAATAAAAAAAAQEQHRRDSGSGSCSSRDHEVSATSFPAGYTVTTAVDMQQHMKQPADHFSFAPFRKTFDQEVGIGGDQVPSNQLGRSEPHHAGLGQQPHGPVLATKTAVPATAFLISRPSNPVSTMVPPAMQHASVVLDHDQFHVPAILLHHHDKFQQQHQQSQPQQKLDRRSAGLEELIMGCTSSTSTKGDASIAHPQETEWPYPYWPPDNQDHHG

SEQ ID NO: 636 - protein, 71 aa, Triticum aestivum
QFFFWVCGQVAFQIFSGMRLGNLYCDPLMVHGGHKITARQRWTPTQMQLQILESIFDQGNGTPSKQKIKDI

SEQ ID NO: 637 - protein, 415 aa, Oryza sativa (japonica cultivar-group)
MATSEAAAISNPFAPLTNHQQEHPPPPPPPAKKKRNLPGTPDPEAEVIALSPRTLMATNRFVCEICGKGFQRDQNLQLHRRGHNLPWKLRQRSGKEPRKRVYVCPEKSCVHHNPSRALGDLTGIKKHFCRKHGEKKWKCDKCSKRYAVQSDWKAHSKTCGTREYRCDCGTLFSRRDSFITHRAFCDALAEETARLNAASGAAAAAAAATATSLCGQSYLFAGSGGPGMAGMRPNMMMPPQFDAAQLSWLYGNGKLSSSNASELTSATAAAKEAESVPSVFSNQQHAKPAAPTDMSATALLQKAAQIGAVTSTAAMPLVSPFEPTKPGGATASPADECGKFDGAALFAAASHHNANLGGAMSELTGAAGNVPYDVLSAVRHHAGLKDAGGVGREETRDFLGVGVQALCSSSIHGWI

SEQ ID NO: 638 - protein, 847 aa, Arabidopsis thaliana
MELDDLDLSGSWPLDQITFASNFKSPVIFSSSEQPFSPLWSFSETSGDVGGELYSAAVAPTRFTDYSVLLASSESETTTKENNQVPSPSWGIMPLENPDSYCAIKAKMTQALRYFKESTGQQHVLAQVWAPVKNRGRYVLTTSGQPFVLGPNSNGLNQYRMVSLTYMFSLDGERDGELGLPGRVFRKKLPEWTPNVQYYSSKEFSRLGHALHYNVQGTLALPVFEPSRQLCVGVVELIMTSPKINYAPEVEKVCKALEAVNLKTSEILNHETTQVICESNICNEGRQNALAEILEILTVVCETYKLPLAQTWVPCRHRSVLAFGGGFKKSCSSFDGSCMGKVCMSTSDLAVYVVDAHVWGFRDACAEHHLQKGQGVAGRAFQSGNLCFCRDVTRFCKTDYPLVHYARMFKLTSCFAVCLKSTYTGDDEYVLEFFLPPAITDKSEQDCLLGSLLQTMKQHYSSLKVVSETELCENNMSLEVVEASEDGMVYSKLEPIRIHHPAQISKDYLELNAPEQKVSLNSDFMENNEVDDGVERFQTLDPIPEAKTVKKSERKRGKTEKTISLEVLQQYFAGSLKDAAKSLGVCPTTMKRICRQHGISRWPSRKINKVNRSLTRLKHVIDSVQGADGSLNLTSLSPRPWPHQIPPIDIQLAKNCPPTSTSPLSNLQDVKIENRDAEDSAGSSTSRASCKVNPICETRFRLPTHNQEPSRQVALDDSDSSSKNMTNFWAHLTCQDTASPTILQHKLVSIKATYREDIIRFKISPESVSITELKQQVAKRLKLETAAFELKYLDDDREWVSVSCDADLSECLDTSAAKANTLRLSVHDVTFNFGSSCESSEETMMCL

SEQ ID NO: 639 - protein, 120 aa, Triticum aestivum
  misc_feature (45)..(45): Xaa can be any naturally occurring amino acid
EGAAGFYKSETGGSSKPESHGTSDCPRGGGGSSSKCTRAAEVHNXSKKWRSRINEKMKALQSLIPNSNKTDKASMLDEAILIEYLKQLQLQVQDNEMLKGQSESMTLQCSCTVPLNITQE

SEQ ID NO: 640 - protein, 445 aa, Oryza sativa
MSFRSIVRDVRDGFGSLSRRGFEVRLVGHRRGRSHSAVHELRDGHAAAAAADVVQSSCWANLPPELLRDVIERLEASEAAWPSRKNVVACAAVCRTWRDMCREIVKNPEFCGKITFPVSLKQPGPRNGAIQCFIKRDKSTQTYNLYLCLSSAVLVESGKFLLSAKRYSRATCTEYTIFMSADNTSRSSNMYIGKLRSNLLGTKFVIYDTQPPCNTANVSQSGKTSRRFYSRKVSPKNPSSTYSIAQVSYELNVLGTRGPRRMNCVMHSIPASSLEAGGTVPCQPDSVLARSLDESFGSISFSKSSIMDRAIRFSSSRYSDISVGGPMVGGQALGDSDESKERPLILRNKAPRWHEQLQCWCLNFKGRVTVASVKNFQLVAATQPAAGAPTPSQPAPPPPPDHDKVILQFGKVAKDMFTMDYRYPLSAFQAFAICLSSFDTKLACE

SEQ ID NO: 641 - protein, 193 aa, Cucumis sativus
  misc_feature (193)..(193): Xaa can be any naturally occurring amino acid
TGDEGNNEYKKGLWTVEEDKILMDYVKAHGKGHWNRIAKKTGLKRCGKSCRLRWMNYLSPNVKRGNFTEQEEDLIIRLHKLPGNRWSLIAKRVPGRTDNQVKNYWNTHLSKKLGIKDQKTKQSNGDIVYQINLPNPTETSEETKISNIVDNNNILGDEIQEDHQGSNYLSSLWVHEDEFELSTLTNMMDFINX

SEQ ID NO: 642 - protein, 558 aa, Zea mays
MEANASRSEGAKAQGGQERKLCHPQESEDDGSPSRGAFIMLPPFGNPLWVPEDMDDQQQHAPPPTPMELLTVPAQGHEEQNLLALASAAAVAGAGCVFSSPAMLDDDWYFDPVAAAAATGAQGHLLLAPPGPVPGPGAGSQMFSLFNVGGAATFDVHGFDIGLGTLGGGSGGDLVPLAGAGNTSNSASFSMSLNAGLLASSFGGFGTAPAQMPDFGGLGGFDMFNNGAGSSSAAPPPASASLTVPFSGRGKPAVLRPLETFPPVGAQPTLFQKRALRRNGGGEDYDKKRKAEATAAAAGASSACGGDDAEDDDGGSIDASGLNYDSEDACRGVEDSGKKDGKGSNANSAGDGKGKRKRLPAKNLMAERRRRKKLNDRLYMLRSVVPKISKMDRASILGDAIEYLKELLRKIEELQNEVESSASPASTASLPPTPTSFRPLTPTLPALPSRVKEELCPSALPSPTSKQPRVEVRTTREGREVNIHMLCARRPGLLLATMRAIEGLGLDVQQAVASCFNGFSLDIFKAELCKDGPALLLLPEEEIKSVLLQSAGLHGVAP

SEQ ID NO: 643 - protein, 198 aa, Trillium camschatcense
QVTFSKRRNGLLKKAFELSVLCDAEVGVIVFSPRDKLYEFSSTSMQSTIDRYRMHTKCVNTNMPTEHNTQQWKYEAVSMANKIELLEASKRKLMGESLEPCTVDELQELESQIERSLSNIRGRKDYLLEQQIEELKEKERRLLEDNELLRHKSEEETELQLATPKGVQYDHGSQQMELETELHIGWPPKVATQCISHA

SEQ ID NO: 644 - protein, 427 aa, Oryza sativa
MGRHSCCYKQKLRKGLWSPEEDEKLMNHITKHGHGCWSSVPKLAGLQRCGKSCRLRWINYLRPDLKRGAFSQEEEDLIIELHAVLGNRWSQIAAQLPGRTDNEIKNLWNSCIKKKLRQKGIDPNTHKPLTEADRRGAAPTVSTERTSGSSDVNPSSAGALGNLSHLLSETAQSSMLLPVYDKNHPETASLPRPKVPPKELFLDQLTAGHESPSSCRSSGPTLYFPFQQPLGYSNECGTGDGASMNSLWFNQNDFNCSTISTVMPPVSPSALSTSMGLNLPPENPRHGGTGIGNTPFYWDGSNPSSSGSTGSSGSNSMGFEPQSTTSILENSVFPWTDIGQEKDTRVHLVEELKWPDLLHGTFAEATTAMQNQSQSLYDDVIKAESQFNMEGICASWFQNQQPQQQLQAASDMYDKDLQRLPLSFEHI

SEQ ID NO: 645 - protein, 208 aa, Brassica napus
  misc_feature (40)..(40): Xaa can be any naturally occurring amino acid
MSFKSILRDLKEVRDGLGGISKRGWSKSSHIAPDHTMTPXENIPQSPWASLPPELLHEIIRRVEESEASWPARAAVVSCASVCKSWRGITMETVRVPEQCGKLTFPISLKQPGPRDLPIQCFIKRNRATASYILYYGLMPSEMENDKLLLAARRVRRATCTDFVISLSAKNFSRRSSTYVGKLRSGFLGTMFTIYDNQTGSFTAQAQP

SEQ ID NO: 646 - protein, 195 aa, Thellungiella halophila
MTKMGFKPDSNPSPNPNESNAKEIRYRGVRKRPWGRYAAEIRDPGKKTRVWLGTFDTAQQAARAYDAAAREFRGAKAKTNFPTFLELNAAKDGGFARSPSQSSTVDSVSPTSARLVTPPQLELSLGGGGGGACYQIPVARRPVYFYNMTTFPAAAAATCGVQSESDSSSVVDFECGAEKKYRPLDLDLNLAPPAE

SEQ ID NO: 647 - protein, 235 aa, Tradescantia virginiana
VQLKRMENKINRQVTFSKRRTGLLKKAHEISVLCDAEVGLIIFSTKGKLYEYSTDNSMAKILERYDRYATAERAVLEANLNLEVGSHYEYRKIKAKVDALQKSQRHLMGEQLDTMTNKELQQLEQQLETALKHIRSRKNQMMLESVAALQKKEKALREQKSILEKKLIEKQKDMEISQIHQYQAHEDNTSPTSLVLTNSLPTTLNTNGCITHAIEEEHAPTLPHTNNNNLPPWMV

SEQ ID NO: 648 - protein, 352 aa, Ischaemum afrum
PSVKHMFPFCDSSSPMDLPLYQQLQLSPPSPKPDQSSSIYCYPCSPSFAAADASFHMSYQIGSAAAATPPQAVINSSELPVQPLMEQALAPGMELGACASGAQRAGAGVSLDRAAAAARKDRHSKIRTAGGMRDRRMRLSLDVARDFFAVQDLLGFDKPSKTVRWLLNVCKAAIQEMVGDDVDASSECVEEGSSSLSVGGKHNPSEQLGGGDQKTKGNGRSEGKKPAKARKAATTTPKPPRKSANNAHPVPDKETRAKARERARERTKEKHRMRWVKLASAIDVEAAAASVASDRPSSNHLNHHSSSSMNMPRAAAAELEERERCSSALNNRGRMQEITGASDMVLGFGNGG

SEQ ID NO: 649 - protein, 226 aa, Paeonia suffruticosa
SQVTFSKRRGGLLKKAHEISVLCDAEVALIVFSTKGKLFEYSTDSSMEKILDRYEQYSIAERQLVEEPGSQGNWSLEYSKLRAKIELLQRNQRRFMGEDLDSLSPKDLQNMEQQLDVSLKNIRSRKNQLMYESISELQKKERAIQEQNNLLAKQIKEKEKTMAQQAQWEQQIHHGPNASAYLLSPHELTTLNMGGNYQGEPTEMRRNELDLTLEPIYTCHLGCFGA

SEQ ID NO: 650 - protein, 615 aa, Nicotiana tabacum
MMMFEEMGFCGDLDFFPAPLKEVETAASQIEQESEPVMDDDYSDEEIDVDELERRMWRDKMKLKRLKEMTKGGKEGVDAVKQRQSQEQARRKKMSRAQDGILKYMLKMMEVCKAQGFVYGIIPEKGKPVTGASDNLREWWKDKVRFDRNGPAAIAKYQADNAIPGKNEGSNPIGPTPHTLQELQDTTLGSLLSALMQHCDPPQRRFPLEKGVPPPWWPTGQEDWWPQLGLSKDQGPPPYKKPHDLKKAWKVGVLTAVIKHMSPDIAKIRKLVRQSKCLQDKMTAKESATWLAIINQEEVLARELYPDRCPPLSSAGGSGTFTMNYSSEYDVDGVVDEPNFDVQEQKPNHLGLLMYVDRFKERLPMQQQSLPIKDEIMIANLDFTRKRKPADELTFLMDQKIYTCECLQCPHSELRNGFQDRSSRDNHQLTCPFRNSPQFGVSNFHVDEVKPVVFPQQYVQPKPASLPINQAPPSFDLSGIGVPEDGQRMINELMSFYDNNIQGNKSSMAANVVMSKEQPRQQPSIQQNNYLHNQGIILDGNIFGDTNISANHSMFPQGDRFDQSKVLTSPFNAGSNDNFHFMFGSPFNLQSTDYTEALSGITQDNMPKQDVPVWY

SEQ ID NO: 651 - protein, 200 aa, Oryza sativa
MDRDESLGTQPLTGRRVRADTRHPVYRGIRLRSGKWVSEIREPGKSSRIWLGTYPTPEMAAAAYDAAALALRGADAALNFPGTATSRPAPASGSPDDIRAAAAAAAAMIGSGHRGNQRAADASTSRAATAAPEAAVAAGAGDQKRVVDEDDVFEMPRLLVSMAEGLMMSPPRLSPSTDGVGGVSPEDDEDEDGMSLWNHS

SEQ ID NO: 652 - protein, 819 aa, Pisum sativum
MAACALFNGVGGGNTTPDETNNNSTSNSSNISTEDFHNMPQQQPHHSERKLLRKRMASEMELQLHNNNNNNDYHRFSRRTNNTSSLNCSLPATTQKGVTTTTTTTLASSGNNNNNNNNNNNYHYHNNNNNSIINNNNNNVALSRDNVAIQNFPTVTVTTNYSTMLLPSSCSSNLNNSSTSAANYTHYQQPLVEEQNTLPEICGFSGLPLFPSQNNQTNRTNNNSSNNRNNTNTVVDVVSSSPSMEETSATTNWIDGILKDLIHTSNSVSIPQLINNVREIIYPCNPNLALVLEHRLRLLTEPNTCVPERKRNSTEQSGVNVNGNVLAASNVNNSSVKLMNRVDDVVPTSLHFSDSSTLLNQNQNQNMFPNWGATQINNNNNPSVSLVTLPSQPLSTQQDQQHQLQQHPEDLAPATTTTTTSAELALARKKKEEIKEQKKKDEEGLHLLTLLLQCAEAVSAENLEQANKMLLEISQLSTPFGTSAQRVAAYFSEAISARLVSSCLGIYATLPVSSHTPHNQKVASAFQVFNGISPFVKFSHFTANQAIQEAFEREERVHIIDLDIMQGLQWPGLFHILASRPGGPPYVRLTGLGTSMETLEATGKRLSDFANKLGLPFEFFPVAEKVGNIDVEKLNVSKSEAVAVHWLQHSLYDVTGSDTNTLWLLQRLAPKVVTVVEQDLSNAGSFLGRFVEAIHYYSALFDSLGSSYGEESEERHVVEQQLLSREIRNVLAVGGPSRSGEIKFHNWREKLQQCGFRGVSLAGNAATQASLLLGMFPSEGYTLVEDNGILKLGWKDLCLLTASAWRPPYHTNTIIPHHN

SEQ ID NO: 653 - protein, 352 aa, Arabidopsis thaliana
MGRPPCCEKIGVKKGPWTPEEDIILVSYIQEHGPGNWRSVPTHTGLRRCSKSCRLRWTNYLRPGIKRGNFTEHEEKTIVHLQALLGNRWAAIASYLPERTDNDIKNYWNTHLKKKLKKINESGEEDNDGVSSSNTSSQKNHQSTNKGQWERRLQTDINMAKQALCEALSLDKPSSTLSSSSSLPTPVITQQNIRNFSSALLDRCYDPSSSSSSTTTTTTSNTTNPYPSGVYASSAENIARLLQDFMKDTPKALTLSSSSPVSETGPLTAAVSEEGGEGFEQSFFSFNSMDETQNLTQETSFFHDQVVKPEITMDQDHGLISQGSLSLFEKWLFDEQSHEMVGMALAGQEGMF

SEQ ID NO: 654 - protein, 506 aa, Triticum aestivum
  misc_feature (144)..(144): Xaa can be any naturally occurring amino acid
MLLRRSEPGNELEELLWDNGPALRRAASPFPPFSCSAAGTMKAQELAKHPASATAMAQGHDDDAVPWLQHYPIIGVDDDGSGGDTAPLPQDYFSTLFPGFSELPAAVASRDAGAPSTSHAAVVVPPLPGATCAPQAAAAGASIXGEGVMNFSFFSRPLQRSLPQASTRTSAAGSKSVESTLLQTNRLRSTPLFSEQRTAWLQPPKELPAAVSASRPPAPPVPVRHAAEPAAALPQRLQPEARAAALPPRLQPEVRAAALPQRLQSEARASEMPPPPATATTSSVCSDNGERSQLKRSSHQTLEWSVSQDDEDLDDEAGGLRRSAARSTKRGRTAEVHNMSERRRRDRINEKMRALQELIPNCNKIDKASMLEEAIEYLKTLQLQVQMMSTMGTAGLCMPPMMAMQHMQMPPMAHFHHHHLGAMGFGMGPFDPRLVAAAGAAQFPYPMMPGAPIFGGHAMPPPPPFHQAAVAGAHMAPGPVTNDAATAAQAEHEQTPGDHPQVPRTM

SEQ ID NO: 655 - protein, 130 aa, Dechloromonas aromatica RCB
MPTINTSDQSGRRALVVDDNPLMRVLLSSMLMHRGYQVSEQNCAEAALTKLKEEQFDLVMLDIMMFEMSGIELCQIIREELGLVDLPVVAYTAHGDLVNVAHMRMAGFTDFLFKPVEARKLDSVLQEIAV

SEQ ID NO: 656 - protein, 230 aa, Spinacia oleracea
GRGKIEIKRIENTTNRQVTFCKRRNGLLKKAYELSVLCDAEIALIVFSSRGRLYEYANQSVKGTIDRYKKACSDQTGAGSVAEANAQYYQQEAAKLRNQIRTATENNRLLSRHMMGEGLSSLSMKELKNLETKLEKGISRIRSKKNELLFAEIEFMQKREIELHNNNQFLRARISENERAQQSMSLMPPGGSDYDLVPSQSFDSRNYFQVNALQPNSQYARQDQTPLQLV

SEQ ID NO: 657 - protein, 92 aa, Bixa orellana
EQDRYMPIANVIRIMRKVLPTHAKISDEAKETIQECVSEFISFITSEANERCQREQRKTITAEDVLFAMSRLGFDDYVDPLSIYLQRYREFE

SEQ ID NO: 658 - protein, 445 aa, Arabidopsis thaliana
MSFRGIVQDLRDGFGSLSRRSFDFRLSSLHKGKAQGSSFREYSSSRDLLSPVIVQTSRWANLPPELLFDVIKRLEESESNWPARKHVVACASVCRSWRAMCQEIVLGPEICGKLTFPVSLKQPGPRDAMIQCFIKRDKSKLTFHLFLCLSPALLVENGKFLLSAKRTRRTTRTEYIISMDADNISRSSNSYLGKLRSNFLGTKFLVYDTQPPPNTSSSALITDRTSRSRFHSRRVSPKVPSGSYNIAQITYELNVLGTRGPRRMHCIMNSIPISSLEPGGSVPNQPEKLVPAPYSLDDSFRSNISFSKSSFDHRSLDFSSSRFSEMGISCDDNEEEASFRPLILKNKQPRWHEQLQCWCLNFRGRVTVASVKNFQLVAARQPQPQGTGAAAAPTSAPAHPEQDKVILQFGKVGKDMFTMDYRYPLSAFQAFAICLSSFDTKLACE

SEQ ID NO: 659 - protein, 261 aa, Arabidopsis thaliana
MEDGELDFSNQEVFSSSEMGELPPSNCSMDSFFDGLLMDTNAACTHTHTCNPTGPENTHTHTCFHVHTKILPDESDEKVSTDDTAESCGKKGEKRPLGNREAVRKYREKKKAKAASLEDEVARLRALNQQLVKRLQNQATLEAEVSRLKCLLVDLRGRIDGEIGSFPYQKPMAANIPSFSHMMNPCNVQCDDEVYCPQNVFGVNSQEGASINDQGLSGCDFDQLQCMANQNLNGNGNGSFSNVNTSVSNKRKGGHRASRAV

SEQ ID NO: 660 - protein, 175 aa, Medicago truncatula
MVHSKKFRGVRQRHWGSWVSEIRHPLLKRRVWLGTFETAEEAAKAYDEAAILMSGRNAKTNFPINVENQTNSISSSSTSSKAFSAVLSAKLRKCCKFPSPSLTCLRLDAENSHIGVWQKGAGPRSESNWIMMVELERKKSASVPEKAKPEELSKNGLDDEQKIALQMIEELLNRN

SEQ ID NO: 661 - protein, 246 aa, Triticum aestivum
GPGLFHILASRPGGPPRVRLTGLGASMEALEATGKRLSDFAHTLGLPFEFYPVAGKAGNLDPEKLGVDTRRREAVAVHWLHHSLYDVTGNDSNTLNLIQRLAPKVVTMVEQDLSHSGSFLARFVEAIHYYSALFDSLDASYSEDSSERHVVEQQLLAREIRNVLAVGGPARTGDIKFGNWREKLAQSGFRAASLAGSAAAQASLLLGMFPSDGYTLVEENGTLKLGWKDLCLLTASAWRPVQALGR

SEQ ID NO: 662 - protein, 739 aa, Mesembryanthemum crystallinum
MEAYSSGEELVIKTRKPYTITKQRERWTEEEHNRFLEALKLYGRAWQRIEEHIGTKTAVQIRSHAQKFFSKLEKEALVKGVPIQQAIDIEIPPPRPKRKPSNPYPRKTGAAGSPSTQIKVKDGNKVPPGSSHTANQLLDLEKEPPPENTTGDDGKQNAKETCGAYKCSETFTLFQEAPSTLTASGNENSAITTGATRKSCKVDDPVPKKLLVDIDGSDCPAADGRQRNQKLDKTDTVETAQNDTENEMHAVKNFPRHTPVHILDGSLGACSQALSSDVSYQESAFHRMGIPGYPAIFSNPAVSAAVESQNSTSRTTNQQMFTSFHPPFTPFPNTPEDYSSFVQMSATFSSLIVSALLQNPAAHAAASFAASFWPCSNMENSANCPAGLSGGFPPRPMNTAPSMAAIAGATVAAATAWWAAHGLLPLCAPVHSGFNCPPASANAPLTNVAQSQATNKEREENNFQNPGSQVQQPDQELSEALQPQHSASKPSATSSSDSGDSAGAKMEIEIPTNDNEIKVPAMTEQKDSSKGKSKKLVDRSSCGSNTPSGSDVETDALQKNDKGKEEPLEPDISQIAGELNNRRNRIASNNLNDSWKEVSEGGRLAFQALFSRERLPQSFSPPQDVSIMDQVMNNGVERNGQNATETNEDASQLDLNSNTWESCSGDQGHLENTGLREKENGKDHFLSIGLAQGKPRDRRTGFKPYKRCSVEARESRLNSNSQDQEKCPKRIRLEGEAST

SEQ ID NO: 663 - protein, 164 aa, Brassica napus
MQQDLTSYDCSSVLDSIRRHLLEDDSESLSSFSSSSSPDLESTRRRGGNFKGVRRRPWGKYAAEIRDPNKHGARIWLGTYETAEEAAAAYDRAAFKLRGAKAKLNFPHLIGIDGPEPSRITKRRLSTPVSCSPVARRRNTDIINLTARVPCLAFHYFNIDTTWC

SEQ ID NO: 664 - protein, 420 aa, Brassica rapa subsp. pekinensis
MVEVEELEPLTPVEEEEEEVISYDDLKRRMWKDRNLMEKLKQQKRHSNDVVSLASHRAEASRRKKMARSQDSVLKYMMKIMEVCKAKGFVYGIVPDKGKPITGSSDSLRRWWKETVQFDQTAPNAVSDYLTIAAAAAAEMIEKEPSSLLHMLQELQDTTLGSLLSALMQHCVPPQRRFPLEKGIAPPWWPTGTELWWGEQGEAHEHGVPPYRKPHDLRKSWKVSVLAAVIKHMSPDLGRVRRLATQSKCLQDKMMAKETDTWSRVLNQEEALLNIKDRKISDQDQEASGSKTKRKCDFMEPSKRPRSDVTQEPRQITGDMISMLVTSPSIGTNTTSEDDYSVSSSAMGKPDDYDSNWMDYLWFERMQPEFNSSRRFDDDEDNPMVLNQSTESNQSDNVSQSIFSVWDMGCEDKDIYMFDY

SEQ ID NO: 665 - protein, 323 aa, Arabidopsis thaliana
MVRPPCCDKGGVKKGPWTPEEDIILVTYIQEHGPGNWRAVPTNTGLLRCSKSCRLRWTNYLRPGIKRGNFTEHEEKMIVHLQALLGNRWAAIASYLPQRTDNDIKNYWNTHLKKKLNKVNQDSHQELDRSSLSSSPSSSSANSNSNISRGKWERRLQTDIHLAKKALSEALSPAVAPIITSTVTTTSSSAESRRSTASASGFLRTQETSTTYASSTENIAKLLKGWVKNSPKTQNSADQIASTEVKEVIKSDDGKECAGAFQSFSEFDHSYQQAGVSPDHETKPDITGCCSNQSQWSLFEKWLFEDSGGQIGDILLDENTNFF

SEQ ID NO: 666 - protein, 140 aa, Brassica napus
  misc_feature (123)..(123): Xaa can be any naturally occurring amino acid
  misc_feature (127)..(127): Xaa can be any naturally occurring amino acid
  misc_feature (129)..(129): Xaa can be any naturally occurring amino acid
  misc_feature (131)..(131): Xaa can be any naturally occurring amino acid
MAHQSLHSPTNPHFFQPLLPGFHTHLNIPVAFFSKHVQGRNKHIKTAKLRTDASAKTWLVKINGLRFTDGWEDFAVAHELRIGDIIIFRHEREMVFHVTAFGPSCCDIQYTSASSHNIIDDSXDQAXNXVXGNSSGEKRK

SEQ ID NO: 667 - protein, 56 aa, Malus x domestica
PIEMMLSWIRNLNPTIVTVVEQEADHNKPGFLDRFTEALYYYSTMFDSLEACPMQP

SEQ ID NO: 668 - protein, 558 aa, Zea mays
MGDPPTSRMGQHPFGDIPSQTPKQFLYSGSSQHLCHPYQSASDAHVAPQRHYTVRSQSQSQSPDAGSEDFETHSRQYTLDSSSASGCSGHGSPSCQSVHAGSRSPVSHSHDDSHSGSTNGNGSPASASCVTEDPTDLKQKLKDLEAVMLGTDTDPETVDSLEIAIADRLSVEPEEWKNNMVSVPRGDLKELLIACARAVEQNNGYSIDLMVPELRKMVSVSGEPLERLGAYMVEGLVARLAASGSSIYKALRCKEPRSSDLLSYMHFLYEACPYFKFGYMSANGAIAEAVKGEDRIHIIDFHIAQGAQWVSLLQALAARPGGPPFVRVTGIDDPVSAYARGGGLELVGKRLSHIAGLYKVPFQFDAVAISGSEVEEGHLGVVPGEAVAVNFTLELHHIPDETVSTANHRDRVLRLVKGLSPRVLTLVEQESNTNTAPFAQRFAETLDYYAAIFESIDLALPRGDRERINIEQHCLAREIVNLVACEGEERVERHEVFGKWKARLMMAGFRPSPLSALVNATIKTLLQSYSPDYKLAEREGVLYLGWKNRPLIVSSAWH

SEQ ID NO: 669 - protein, 405 aa, Arabidopsis thaliana
MTTKRIDRDLPSSDDPSSAKRRIEFPEETLENDGAAAIKLLSLLLQCAEYVATDHLREASTLLSEISEICSPFGSSPERVVAYFAQALQTRVISSYLSGACSPLSEKPLTVVQSQKIYSALQTYNSVSPLIKFSHFTANQAIFQALDGEDSVHIIDLDVMQGLQWPALFHILASRPRKLRSIRITGFGSSSDLLASTGRRLADFASSLNLPFEFHPIEGIIGNLIDPSQLATRQGEAVVVHWMQHRLYDVTGNNLETLEILRRLKPNLITVVEQELSYDDGGSFLGRFVEALHYYSALFDALGDGLGEESGERFTVEQIVLGTEIRNIVAHGGGRRKRMKWKEELSRVGFRPVSLRGNPATQAGLLLGMLPWNGYTLVEENGTLRLGWKDLSLLTASAWKSQPFD

SEQ ID NO: 670 - protein, 487 aa, Arabidopsis thaliana
  misc_feature (272)..(272): Xaa can be any naturally occurring amino acid
MANASPLSPTNQHFFQPLLPGFQSNLKIPVNYFSEHIEGKHEGKTVTLRTDASERTWEVKMEGHRLTEGWKEFVEAHDLRIGDFVVFRHEGDMVFHVTALGPSCCEIQYPQSSRHEEGEESGENEISEKEGEENVQKESDKSSSDLNCFSQSVTHSNISRDAVSVPRDFVKRSGFSKGRHEIVLMNEEGKSWESEVKSYMSGAVYLVGGWTTFCTENKLDVGDSCTFKLLQKAKTPVFQLCSRTKVESMNITGESKFVKLTPTPSSLALGKXHLPLSFTKVNGLINPGKIILVDKDRAEWSMMLKVDSRGAVYIIGGNDWKSFCAANEVGAGESLALELIQGGVSPLLKFCSKMEQPSFKAEDGRHKRARVQNRSQETDKGAETSRASTMGPKLEITEKGEPSRASTMRPKVEIREKIAETGEPSRASNKSSGIEGNLQHTKPCSVKTDQLAKVKESVVDTLTSIGRFQAELETMKRKLEDSLQELN

SEQ ID NO: 671 - protein, 276 aa, Zea mays
MISGNLTNEDLGAGRTKAEGPTTAAGAVVAKSPVLPSSRHWPPSTESRIVRVSRVFGGKDRHSKVRTVKGLRDRRVRLSVPTAIQLYDLQDRLGLSQPSKVVDWLLDAAQHEIDKLPPLQFPPQAAQDLVAHLPPPSMVAPFAADRAEADGDKRHCHAGVKGLMGLNNSIRLVNATMPLAHGLYYTPGESWTGTNADDAAAHDHQTVAHGHSPFSSLLSLAAPGPQLVFYSSEGGGFTMKEEATGYQFPVQNSLDHSQGQLSLSSARSFLRPGNQG

SEQ ID NO: 672 - protein, 231 aa, Nicotiana benthamiana
MAPKEKGTAAGKVNGVSKEVHYRGVRKRPWGRYAAEIRDPGKKSRVWLGTFDTAEDAARAYDAAAREFRGTKAKTNFLVLEQENVKLANGNRSPSYSSTVENSPPVMPENSPPAVILDTSPLDLSLGGSGSLFSNGVGRFHMYYLEAVQREQVISSYKKSCRTTAEFIAGCGGGASGESDCRTTAEFIAGCGGGASGESDSSSVIDFMGHDLKPTTRPINLDLNLPPPENM

SEQ ID NO: 673 - protein, 488 aa, Glycine max
MKMISSASNENKTVVDMDDHLAGLGYKVRSSELCQVAANMERLENVISSTDLSQLASDTTLYDPSNIGLGSWVDTLLSEFDQTASLPLQYDFATDPNHNKQLALVTTVEEDSGIRLVHMLMTCADSVQRGDFSFAGSLIENMQGLLAHVNTNCGIGKVAGYFIDALRRRISNTLPTSSSTYENDVLYHNYYEACPYLKFAHFTANQAILEAFNGHDCVHVIDFNLMQGLQWPALIQALALRPGGPPLLRLTGVGPPSAENRDNLREIGLRLAELARSVNVRFAFRGVAAWRLEDVKPWMLQVSLNEAVAVNSIMQLHRVTAVDAAVEEVLSWIRSLNPKIVTVVEQEANHNGEGFLERFTEALHYYSTVFDSLDACPVEPDKAALAEMYLQREICNVVCCEGPARLERHEPLAKWRDRLGKAGFRPLHLGFNAYKQASMLLTLFSAEGFCVQENQGSLTLGWHSRPLIAASAWQAAPLRDDETLRFGH

SEQ ID NO: 674 - protein, 274 aa, Glycine max
MYGQSSYESDLALLDSIRRHLLGDSEEHKFGAPNVSSGNTPAYSRSSCFSRLYPCLSNDWGELPLKEDDSEDMLLYGVLRDAINAGWVPSLDASSPESFSSGFIPAVTVKSEPDLFPAPEPVYIPPAAQKAEPAVVPAKGKHYRGVRQRPWGKFAAEIRDPAKNGARVWLGTFETAEDAALAYDRAAYRMRGSRALLNFPLRINSGEPEPVRVTAKRYSPEPSSSSSDSASSTKRRKKVVGSTVTAQSGLRKEQVGSQVAHSAHVESSCWSTNA

SEQ ID NO: 675 - protein, 220 aa, Dendrobium grex Madame Thong-In
MGRGRVELKRIENKINRQVTFAKRRNGLLKKAYELSVLCDAEVALIVFSNRGRLFEFCSSTSMTKTLERYQKCSYNASESAVPSKDAQNSYHEYLTLKAKVEYLQRSQGNLLGEDLIELSSKELDQLELQLEMSLKQIRSTKTQLMLDQLCDIKRKEQMLHEANRALSMKLKEDGPEIPLELSWPGGETNGSSERQQPQSDKFFQPLPCSNPSLQIGYSP

SEQ ID NO: 676 - protein, 449 aa, Zea mays
LYIPQTCKLCEFGWSSQVLHCVEMGRHSCCYKQKLRKGLWSPEEDEKLMNHITKHGHGCWSSVPKLAGLQRCGKSCRLRWINYLRPDLKRGAFAQDEEDLIIELHAVLGNRWSQIAAQLPGRTDNEIKNLWNSCIKKKLRQKGIDPNTHKPLTEADRSGAAPTISTERTSGSSDINPSSAGALGNLSHLLSETAQSSMLMPVYDKNRAETPNLARPKLPPKELFLEQLTAGHESPSTCHSSGQTLYFPFQQPLGYNSESGSSDGANMNSLWFNQSDFNCSTISTVMPPVSPSALSTSMGLNLPPDNPRHGGTGIGSTAVDSFYWDGTNPSSSSSTGSRGSNSMGFEPQSTSTILENSVFPWTDIGQEKDTRAHLVAELKWPDSFAETTTVMQNQSQTLYDDVIKAESQFNIEGICASWFQNQQPQQQLQVAPDMYDKDLQRMQLSFENI

SEQ ID NO: 677 - protein, 186 aa, Glycine max
MASDAKLSSSESLNGLKFGQKIYFEDVGFATPATSLTSSATTATTVTSSSSSSSRKGRGGSVQPAQPPRCQVEGCEVDLSNAKTYYSRHKVCGMHSKSPTVIVAGLQQRFCQQCSRFHQLPEFDQGKRSCRRRLAGHNERRRKPPPSSLLTSRYARLSSSAFDHSGRGGNFLMELASYPKLSLRNS

SEQ ID NO: 678 - protein, 610 aa, Glycine max
IRLEARRRQKGREHKDKFDLVISDVHMPDMDGFKLLELVGLEMDLPVIMLSANGDTKMVMKGISHGACDYLLKPVRMEELKNIWQHVIRRKKFDSKEKNKTSNLDKPTSNSGNGLGSSGTGNSDQNEKLTKKRKDQDEDEDEDQENDLDNEDPSAQKKPRVVWSVDLHRKFVAAVNQLGIDKAVPKKILDLMNVEKLTRENVASHLQKYRLYLKRISCVANQQANMVAALGVADPSYLRMSSVSGVGHVQTLSGSGQLHNNNFRSFPPSGIINRLNTPAGLNVHGFPSGVLQLSQSQNLNNANDHHKFQSVIVPVNQNGVQGMTVSVGLDQLQNNKVVMSVQNLTTVFDAKTTFPIPNKLPDPRPKITNSVSHTSDVHFSNNALMLEPRPQGSQGSVRIGTLSSSVASQHSEFSLSLLDQGRYSDNWTSAVQPSVIQTNFFPPSECFRQTNIPPADNMASVPLQGGNLSGPSITSLSRQSHDSMTEMHSEGMTFTNRPGHTSSNVPFQGWDDHNQDATHHSNIMSINSLTPVNGAAVQAGHAATNSVLHRNLDFNYCDPLQMKHEGFVELTDETLLKQHQGNTMDQQKSQENHFSNNLGSLEDLVSSMMK

SEQ ID NO: 679 - protein, 738 aa, Thiobacillus denitrificans ATCC 25259
MHKENAPVSDDPLHPHPQRSTVSSFPARPRILVVDDEILILEGMRRLLAARDYDVTTANGGCEALIAIGKQQFDVILLDLGMPDLSGAEVLRFVADRSADTPVIVVSGDSTIDAAIRALRGGAADFVRKPYEPEELLRRVDNTLTRRRLERENNHILQRLQQSEKWHRFLVNSSPDFIYTLDCDGRFTFVNDRVESLLGYTREDLLGQHYSTIIHEEDLARAEHVFNERRAGDRSARNIEIRLKCNPGMRRPRLMNGRCKAVELTATGMYDEDATLFERRFIGSYGVAKDVTERKQAEETVHYQAYHDLLTGLPNRALFRDHLALMLAQAKRSHKTLAVLSLDLDHFKVINDSLGHTIGDELLLAVGARLRQCLREGDTLARLGGDEFAVLLPTLLSRGDVEQICRKIIQVLSRPVYVKGHEIYISVSIGACVAPDDGEMIDSLIRQAEIAMYQAKAQGRSRLQFWEAGMQAPYSERMQIEADLRRALARNEFVLFYQPQVDTVSGEVRGFEALLRWWHPQRGFLSPAEFIPVAEESGVIVPIGDWVLREASAQMAEWRRAGLPQVRLSVNISARQLESPDFVESVMRAVQVHALDGQQIELEITESLLMRDFEANAIKLGRLSASGIRLAIDDFGTGYSSFKYLSRFPIHTLKIDQSFIQELEREENLSIVNAMVAMGRGMNLNVVAEGVETQSQLACLQQMQCHEMQGHYYSVPMSGHDATALLGRHTRGFVEAAG

SEQ ID NO: 680 - protein, 384 aa, Brassica rapa subsp. pekinensis
MELKEGSNQISEIEEGENKRDRYKRSANMRRSPCSDDSGLKKGPWTPEEDEKLVNYIQKHGHSSWTALPKRAGLNRCGKSCRLRWTNYLRPDIKRGRFSPEEEQTILNLHAVVGNNQRFCVPVLLAYVDNVIRWSTIANNLPGRTDNEIKNFWNTHLKKKLIQMGVDPMTHRPRPDIFSSLSQLVSMSSNLRGFVDMQLQFQTDQEQTILKLQTEMAKLKLLHDLLQPPSMNNNTNPNDFDTRSLLHSIASLKETYTTSNNPDLGPYLQDFSSIPSLETLNTNMVPSSISPRDLEDSHFKFFSQRDNLPVSPVWLSDPSSSNQSLLPSLDHSSVVSGDLIRNQYIIEDVNSNLMTSSSGQESGASASPVWPDHLLDDSIFSNIL

SEQ ID NO: 681 - protein, 262 aa, Glycine max
MVNAMEWQKQRCWQPNRNAEMMCVKVMTDEQLEILRKQIAVYATICEQLIEMHKNISAHQDLAGIRLGNMYCDPLLGSGGLKIASRQRWTPTAMQLQILERIFDQGIGTPTKEKIKEITNELSQHGQISETNVYNGSKTRRARSNPQQQNVAPSANAESEVETEVDSKDKKTKPDEFQAPPSVSAGPADNLGFQNHDSLQYLNPESNKPDSVFPSDGTRNFHHVPAFDGLLSNSRSNYLTGKLETPENYELYQPAGDYNIAG

SEQ ID NO: 682 - protein, 428 aa, Oryza sativa
MGRHSCCYKQKLRKGLWSPEEDEKLMNHITKHGHGCWSTVPKLAGLQRCGKSCRLRWINYLRPDLKRGAFSQEEEDLIVELHAVLGNRWSQIATRLPGRTDNEIKNLWNSCIKKKLRQKGIDPNTHKPLAEVDRSKATPTISNDRTSESSDVDPSSGVALHNLSHLLSETAQSSELLPVKVTKPRTQAPGLARLKVPPKELFLDQLTSGHENLPSCRSSGPIPNFPFQQLLCYNNDFNSMDVGNRNSLWYNQNESSSSTISTVMPPVSPSTLSTSTGLNPSPDNANSRGTGIHNSQFYWDTNNPSSSSSTGSSGNNGLGFELQSTSSLLETNIFPWSDLAPEKDSQAQLEEELKWPDLLHGTFSEMPAPMQNLSQSLYEDVVKAESQFNMEGLCAAWSQNLLPQQHLPVVSDMYDKDLQRMSLSFENI

SEQ ID NO: 683 - protein, 225 aa, Oryza sativa (japonica cultivar-group)
MARLTTLITSTSLPPQPRAHSSLSRRERALSLAATTRNPSPSSRTSAMARPQQRYRGVRQRHWGSWVSEIRHPLLKTRIWLGTFETAEDAARAYDEAARIMCGPRVRTNFPHDVADEAAPPPPPHSAAAASSSFLSAALVAKLHRFNLASVQAAQRGNSNDDDSTTSSSAAASSRAVIPSLPAAAGALGNAAATAEWSGGFLEEQYVDQMIEELLDSNFSMEISC

SEQ ID NO: 684 - protein, 264 aa, Thermobifida fusca YX
MLPSPRGLRVLAVDDVPLALTELCRLLRAAPEVGEVVAADDPISALRNIQADRFDAVFLDISMPGLDGVELANLLSKLSDPPVIVFVTAHEEHAVTAYGIGAVDYLLKPVRAERLAMALTKVVRMLSAGTAPVTPHRVRRPDAMAVLPVETAGRTRYVRRSDVRFVEANGDYVRLHTPEGVHLVRMPISRLEEYWADSGFLRVHRGYLVALSAIRELRSDSSGGLLAHTDLGDVPVSRRHARELREQLLHAAQTGMFDDPTRGA

SEQ ID NO: 685 - protein, 180 aa, Zea mays
MADAPASPGGGGGSHESGSPRGGGGGGGGSVREQDRFLPIANISRIMKKAIPANGKIAKDAKETVQECVSEFISFITSEASDKCQREKRKTINGDDLLWAMATLGFEDYIEPLKVYLQKYREMEGDSKLTAKSSDGSIKKDALGHVGASSSAAQGMGQQGAYNQGMGYMQPQYHNGDIKK

SEQ ID NO: 686 - protein, 243 aa, Arabidopsis thaliana
MYGQCNIESDYALLESITRHLLGGGGENELRLNESTPSSCFTESWGGLPLKENDSEDMLVYGLLKDAFHFDTSSSDLSCLFDFPAVKVEPTENFTAMEEKPKKAIPVTETAVKAKHYRGVRQRPWGKFAAEIRDPAKNGARVWLGTFETAEDAALAYDIAAFRMRGSSALLNFPLRVNSGEPDPVRITSKRSSSSSSSSSSSTSSSENGKLKRRRKAENLTSEVVQVKCEVGDETRVDELLVS

SEQ ID NO: 687 - protein, 852 aa, Oryza sativa (japonica cultivar-group)
MDLFVAIALGLERMVRRNSDTTSKRVDQINSKWQFHLSIDDNTDSSCLFKERLTQALRYFKESTDQHLLVQVWAPVKSGDRYVLTTSGQPFVLDQQSIGLLQYRAVSMMYMFSVDGENAGELGLPGRVYKQKVPEWTPNVQYYSSTEYPRLNHAISYNVHGTVALPVFDPSVQNCIAVVELIMTSKKINYAGEVDKVCKALEAVNLKSTEILDHPNVQICNEGRQSALVEILEILTVVCEEHKLPLAQTWVPCKYRSVLAHGGGVKKSCLSFDGSCMGEVCMSTSDVAFHVIDAHMWGFRDACVEHHLQKGQGVSGKAFIYRRPCFSKDISQFCKLEYPLVHYARMFGLAGCFAICLQSMYTGDDDYILEFFLPPNCRNEDDQNALLESILARMKKCLRTLKVVGNGDTNEVCLQISNVLIIETEDLKTNVHFENSEGCFRESPESNGSQRVHEVDNDGNKVSIMSERHLLADDNSQNNGASVGRPNGSGASDSLHKSNKPPERRRGKAEKTISLDVLQQYFSGSLKNAAKSLGVCPTTMKRICRQHGISRWPSRKINKVNRSLSKLKQVIESVQGSDAAFNLTSITGPLPIPVGPSSDSQNLEKASPNKVAELSNLAVEGDRDSSLQKPIENDNLAILMSQQGFIDANNNLQLEADKASHSRSSSGEGSINSRTSEASCHGSPANQTFVCKPIASTFAEPQLIPEAFTKEPFQEPALPLSRMLIEDSGSSKDLKNLFTSAVDQPFLARSSNLALMQNSGTVTIKASFKEDIVRFRFPCSGSVTALKDEVAKRLRMDVGMFDIKYLDDDHEWVKLACNADLEECMEISGSHVIRLLVSDVAAHLGSSCGSSG

SEQ ID NO: 688 - protein, 116 aa, Brassica napus
MYGGAEMWNPSKVERLEDDDESWEVKAFEQDTKGNISGTTWPSRSYACNFCRREFRSAQALGGHMNVHRRDRASKAHQGPAAAVAARSRGLSIGGKKTFLNSCVLATATTYYSIHS

SEQ ID NO: 689 - protein, 264 aa, Hordeum brevisubulatum
MTRKKKVRRRSTGPDSVAETIKKWKEQNQKLQQENGSRKAPAKGSKKGCMAGKGGPENSNCAYRGVRQRTWGKWVAEIREPNRGNRLWLGSFPTAVEAARAYDDAARAMYGATARVNFPEHSPDANSGCTMAPSLLLSNGATAVSHPSDGKDESESPPSLVSNAPTAALHRSDAKDEFESSGTVAHKVKAEVSNDLRSTHEEHKALEVTQPKGKALHKEANVSYDYFNVEEVLDMIIVELSADVKMEAHEEYQEGDDGFSLFSY

SEQ ID NO: 690 - protein, 340 aa, Glycine max
MDRGDQMTFPGSASYYMQRGIPGAGNQPELHNSPNIRPLSNSNLPFQSSIGGGGTIGSTLPLESSGISAPCVNVSAPSGAVPGETVKRKRGRPRKYGPDGAVSLALTPTPASHPGALAQGQKRGRGRPPGSGKKQQLASLGELMSGSAGMGFTPHIITIAVGEDIATKIMSFSQQGPRAICILSANGAVSTVTLRQPSTSGGTVTYEGRFEIVCLSGSYLVADSGGTRNRTGGLSVSLASPDGRVVGGGVGGVLIAASPVQVILGSFSWGASKTKIKKKEGSEGAEVAIETDHQTVHNPVAVNSISPNQNLTPTSSLSPWPASRSLDMRNSHIDIDLMRG

SEQ ID NO: 691 - protein, 213 aa, Cardamine flexuosa
MVRGKTQMKRIENATSRQVTFSKRRNGLLKKAFELSVLCDAEVSLIIFSPKGKLYEFASSNMQDTIDRYLRHTKDRVSSKPVSEENMQYLKFEAANMMKKIEQLEASKRKLLGEGIGTCSIEELQQIEQQLEKSVKCIRARKTQVFKEQIEQLKQKEKALAAENGKLSEKWGSHETEVWSNKNQESGRGDEESSPSSEVETQLFIGLPCSSRK

SEQ ID NO: 692 - protein, 339 aa, Arabidopsis thaliana
MEQAALKSSVRKEMALKTTSPVYEEFLAVTTAQNGFSVDDFSVDDLLDLSNDDVFADEETDLKAQHEMVRVSSEEPNDDGDALRRSSDFSGCDDFGSLPTSELSLPADDLANLEWLSHFVEDSFTEYSGPNLTGTPTEKPAWLTGDRKHPVTAVTEETCFKSPVPAKARSKRNRNGLKVWSLGSSSSSGPSSSGSTSSSSSGPSSPWFSGAELLEPVVTSERPPFPKKHKKRSAESVFSGELQQLQPQRKCSHCGVQKTPQWRAGPMGAKTLCNACGVRYKSGRLLPEYRPACSPTFSSELHSNHHRKVIEMRRKKEPTSDNETGLNQLVQSPQAVPSF

SEQ ID NO: 693 - protein, 131 aa, Glycine max
MGRLLLLEAHVACLRVATPVNQLPRIDAQIAARAPPPVPPAAAPAGGEELDLFMTHYVLLLCSFKEQLQQHVRVHAMEAVMACWELEQTLQSLTGASPGEGTGATMSDDEDNPVDSESNMFDGNDVSDGMG

SEQ ID NO: 694 - protein, 641 aa, Oryza sativa
  misc_feature (480)..(480): Xaa can be any naturally occurring amino acid
MMGGGLVMDQGMMFPGVHNFVDLLQQNGGDKNLGFGALVPQTSSGEQCVMGEGDLVDPPPESFPDAGEDDSDDDVEDIEELERRMWRDRMKLKRLKELQLSRGKDPAGGVVGDPSKPRQSQEQARRKKMSRAQDGILKYMLKMMEVCRAQGFVYGIIPEKGKPVSGASDNLRGWWKEKVRFDRNGPAAIAKYQADNAVPGFESELASGTGSPHSLQELQDTTLGSLLSALMQHCDPPQRRYPLEKGVPPPWWPTGDEEWWPELGIPKDQGPPPYKKPHDLKKAWKVSVLTAVIKHMSPDIEKIRRLVRQSKCLQDKMTAKEISTWLAVVKQEEELYLKLNPGARPPAPTGGITSAISFNASSSEYDVDVVDDCKGDEAGNQKAVVVADPTAFNLGAAMLNDKFLMPASMKEEATDVEFIQKRSASGAEPELMLNNRVYTCHNVQCPHSDYGYGFLDRNARNSHQYTCKYNDPLQQSTEKXPSPPAIFPATYNTPNQALNNLDFGLPMDGQRSITELMNMYDNNFVANKNLSNDNATIMERPNAVNPRIQIEEGFFGQGSGVGGSNGGVFEDVNGMMQQPQQTTPAQQQFFIRDDTPFGNQMGDINGASEFRFGSGFNMSGAVEYPGAMQGQQKNDGSNWYY

SEQ ID NO: 695 - protein, 218 aa, Aspergillus niger
MSSTSPSKEPEVEPEVQSGEDQEQMDKEQQDTQAQGQGEFEVKEQDRWLPIANVARIMKLALPENAKIAKEAKECMQECVSEFISFITSEASEKCQQEKRKTVNGEDILFAMTSLGFENYAEALKIYLSKYRETQSARGEHQNRPTSSGYGAGAPVGAPGPAGPGGRPMAPGAGFPDTADSANNIMNQSLDPSEQDTSTYGYPPMVGQPHNGTAGESY

SEQ ID NO: 696 - protein, 513 aa, Arabidopsis thaliana
MMNKDMLLHQHQQPQQDENMSNLTSASGDQASVSSGNITEASGSNYFPHHQQQQEQQQQQLVVPDSQTQKKRRNQPGNPDPESEVIALSPKTLMATNRFVCEICNKGFQRDQNLQLHRRGHNLPWKLKQRSNKEVIRKKVYVCPEASCVHHDPSRALGDLTGIKKHFCRKHGEKKWKCDKCSKKYAVQSDCKAHSKTCGTKEYRCDCGTLFSRRDSFITHRAFCEALAEETAREVVIPQNQNNNQPNPLLIHQSASHPHHHHQTQPTINVSSSSSSSHNHNIINSLHFDTNNGNTNNSNNSNNHLHTFPMKKEQQSNDHIMNYHHSIIPPWLAPQPHALTSSNPNPSNGGGGGGSLFSLASPAMSATALLQKAAQMGSTKTPPLPPTTAYERSTHNNNLTTTMAAMMTSPSGFISSNNNNHVLFQDYNASGFDNHGREEAFDDTFGGFLRTNEVTAAAGSEKSTKSGGGEGLTRDFLGLRPLMSHNEILSFAGLGSCINSSASDQLHPKPWQG

SEQ ID NO: 697 - protein, 306 aa, Brassica napus
  misc_feature (68)..(68): Xaa can be any naturally occurring amino acid
  misc_feature (72)..(72): Xaa can be any naturally occurring amino acid
  misc_feature (90)..(90): Xaa can be any naturally occurring amino acid
  misc_feature (110)..(110): Xaa can be any naturally occurring amino acid
MASNNNNPHENLSDKTPSDDFFEQILGLPNFLASSSDGGLGGGGAPPMMLQGGSGGEGGHRGGLGGGXVGVXTQVNPEGGEAFTRQKRSXYLRLVNGSCFLRAESDLVIXDHGKPLILCAGPTQQPGPAAPHQPTSIRPRVRARRGQATDPHSIAERLRRERIAERIRALQELVPTVNKTDRAAMIDEIVDYVKFLRLQVKVLSMSRLGGAGAVAPLVTDMPLSSSVEDETSEGGRTPQLAWEKWSNDGTERQVARLMEENVGAAMQLLQSKALCMMPISLAMAIYHSQPPDTSSVVKPETNPPPQ

SEQ ID NO: 698 - protein, 95 aa, Oryza sativa
MTKYKGVRQRHWGSWVAEIRHPLLKTRIWLGTYGTAEDAARAYDEAARLMSGPAARTNFPLSSSGGNARSCLSPTLRARLEKCCGAGNSIVCHSP

SEQ ID NO: 699 - protein, 167 aa, Oryza sativa (japonica cultivar-group)
GRWSATRPGGGGGGGGGVREQDRFLPIANISRIMKKAIPANGKIAKDAKETVQECVSEFISFITSEASDKCQREKRKTINGDDLLWAMATLGFEDYIEPLKVYLQKYREMEGDSKLTAKAGDGSVKKDVLGSHGGSSSSAQGMGQQAAYNQGMGYMQPQYHNGDVSN

SEQ ID NO: 700 - protein, 175 aa, Draba nemorosa var. hebecarpa
MVRGKTQMKRIENATSRQVTFSKRRNGLLKKAFELSVLCDAEVSLIIFSPKGKLYEFASSNMQDTIDRYLRHTKDRISSKPVSEENMQHLKHEAANMMKKIEQLEASKRKLLGEGIGTCSIEELQQIEQQLGKSVKCIRARKTQVFKEQIEQLKQKEKALAAENEKLSEKWGSNE

SEQ ID NO: 701 - protein, 415 aa, Oryza sativa
  misc_feature (110)..(110): Xaa can be any naturally occurring amino acid
  misc_feature (122)..(122): Xaa can be any naturally occurring amino acid
MATSEAAAISNPFAPLTNHQQEHPPPPPPPAKKKRNLPGTPDPEAEVIALSPRTLMATNRFVCEICGKGFQRDQNLQLHRRGHNLPWKLRQRSGKEPRKRVYVCPEKSCXHHNPSRALGDLXGIKKHFCRKHGEKKWKCDKCSKRYAVQSDWKAHSKTCGTREYRCDCGTLFSRRDSFITHRAFCDALAEETARLNAASGAAAAAAAATATSLCGQSYLFAGSGGPGMAGMRPNTMMPPQFDAAQLSWLYGNGKLSSSNASELTSATAAAKEAESVPSVFSNQQHAKPAAPTDMSATALLQKAAQIGAVTSTAAMPLVSPFEPTKPGGATASPADECGKFDGAALFAAASHHNANLGGAMSELTGAAGNVPYDVLSAVRHHAGLKDAGGVGREETRDFLGVGVQALCSSSIHGWI

SEQ ID NO: 702 - protein, 174 aa, Glycine max
  misc_feature (65)..(65): Xaa can be any naturally occurring amino acid
MSDAPASPSHESGGEQSPRGSLSGAAREQDRYLPIANISRIMKKALPPNGKIAKDAKDTMQECVXEFISFITSEASEKCQKEKRKTINGDDLLWAMATLGFEDYIEPLKVYLARYREAEGDTKGSARSGDGSARPDQVGLAGQNAQLVHQGSLNYIGLQVQPQHLVMPSMQGHE

SEQ ID NO: 703 - protein, 470 aa, Arabidopsis thaliana
MADTPSSPAGDGGESGGSVREQDRYLPIANISRIMKKALPPNGKIGKDAKDTVQECVSEFISFITSEASDKCQKEKRKTVNGDDLLWAMATLGFEDYLEPLKIYLARYREGDNKGSGKSGDGSNRDAGGGVSGEEMPGKLEISELFIVELIDNYFGFTLNFAARVKIDFVQPMAHKESKWNHRKSLAWDTAFSTNPGVLDPEELFGSLKIDENEIEVEVNHNHTLPSKTDARPSFAWDNAFFTDPGVLDAEELCLVNNGFTSNTQLRKSADTTTTQGSRFSVASIEFDLFHDLRASLRNSPNVKQTVTQETHRKLPDGIKRTKGYKQKVQPLSLIPQPKVSSSSSSSFSLSSISKSLTPSQAIREKKCVASELERNKEKHKNHGFEEQSGSKSNIRSSYSSYAVKDLTSSYSGLRLPLPKMGFFDSENGEKENREPNALEANRRRRHKSKLETSSTPENRSILGQRKTRK

SEQ ID NO: 704 - protein, 285 aa, Zea mays
MREKRVYVPDSVRGQDLTEPSYAPVRGDRLTHDIPTVDVLQFYPLTHAWSTALGPSTPALQSVYAAFYQGGLVTENLHSRKMVQPKKFRGVRQRHWGSWVSEIRHPLLKRRVWLGTFETAEEAARAYDEAAVLMSGRNAKTNFPIQRSSTGEPTPAAGRDARSNFSSGSSTTNLSQILSAKLRKCCKAPSPSLTCLRLDPEKSHIGVWQKRAGARADSNWVMTVELNKDAASTDAASQSTSATTAPPATPMDEEERIALQMIEELLSSSSPASPSNGDDQGRFII

SEQ ID NO: 705 - protein, 294 aa, Glycine max
MEVAVAKALKPSLRSEFIVQKMHCEDIFSLNANTVAVGEDFSVDDLFDFSNGSLHNEHQQECDEEKQSLSASSQSQDRGEDDSNSNSTGVSYDSLFSTELAVPAGDLEDLEWVSHFVDDSLPELSLLYPVRSEEANRFVEPEPSVKKTPRFPWEMKITSKARSVRNRKPNTRVWSLGSTLLSLPSSPPAKKQKKRAEAQVQPVGVQIQRRCSHCQVQKTPQWRTGPLGAKTLCNACGVRYKSGRLFSEYRPACSPTFCSDIHSNSHRKVLEIRKRKEVAEPDTGLAQTQMVPTC

SEQ ID NO: 706 - protein, 369 aa, Arabidopsis thaliana
MADPVLQSPKNSHFFQPLLPGFDSYLNIPVKFFSKRIQGRNEGRTVELRTDASEKTWQVKIQGRRLTVGWKEFASAHDFRVGDIIVFRHEGSLVFHVTALGPSCCEIQYVPSCNNQENISNLSMKQSIKTELESSLDEDKVNMGKFPRKKHVKKRIPEAEAKSFSSDKSCFVAHVTDSNLREDTLFLPRKFDRSDGLIKGSNKIVLMNEEARTWTLILKFRNSSRTFYMRGGWTSFSMSMGLNLEIPSRLNWVSTKDFNKIKRKESGDSSQKVPSSSSSVSEYRFLTLTVTPAALKDGRLRVPIKFIKGNRMENLGMKKITLLDKHGVEWPVNLVMYKGNTQTRFGSGLKEFFKANGIEACKSFVLELV

SEQ ID NO: 707 - protein, 198 aa, Gossypium barbadense
MCGGAIISDFVAPKYDRKLTGDDLWSELDIFSDLLGFDNNGKSFVNHQFHNNNNNKLINPKDNQLNKERSETIQKTSQVTKKVEKTQRTRKNFYRGIRQRPWGKWAAEIRDPQKGVRVWLGTYNTAEEATRAYDEAAKRIRGDKAKLNFPQTPTKNQAASPALTLLPPAKKRCIVPGVNSTEFTRLDSPPISLWVLGV

SEQ ID NO: 708 - protein, 319 aa, Gossypium barbadense
MSNVYLWFMYPYDIKFFFLCSIIEGSNSEKSMQFDGQAEKCAKRKRKNQYRGIRQRPWGKWAAEIRDPRKGVRVWLGTFNTAEEAARAYDAEARRIRGKKAKVNFPNETPRTSPKHAVKTNSQKPLSKSNLSPVQLNLDQNYNYLSQPEQEYFDTMGFVEEKPLVNQFAYVDPVPTSIDAGSNQSDNAPLYFNSDQGSNSINCSDYGWGEQGARTPEISSILEASVVGEEFLEDANPSKKLKPSSDNVMPAEDNSAKTLSDELLALDNQMKYFQMPPFIEGNWDATIDAFLNGDATQDGGNPMDLWNFDDFPTMAEGVF

SEQ ID NO: 709 - protein, 307 aa, Oryza sativa
MILGSNQAAAAAAAAAAAEEEAAELARKHTAAVATSRQWSAQTESRIVRVSRVFGGKDRHSKVKTVKGLRDRRVRLSVPTAIQLYDLQDRLGLNQPSKVVDWLLNAARHEIDKLPPLQFPPQDHLCMGHHHHLPSAMPLMHHHGHHHHADDDKYHVAAAAAALAAEKEAAAAGGGGGGGGDDVDGGGGGGAAHIVGRFPAGGYHRFMGLNNPLGMVNSAAGAAMPFHYAGESWNNGSVQDSGAGSPQVAAAAAHHTSPFPSLLSLAPGPHHQLVFYSSEAEQFTVDNLGSQGLSLSSARAFHDQTGS

SEQ ID NO: 710 - protein, 312 aa, Pisum sativum
MATKLCDSCKSTKATLFCRSDSAFLCITCDSNIQAANKLASRHHRVTLCEVCEQAPAHVTCKADAAALCVSCDHDIHSANPPASRHERIPLNTFHHNSKQQFFSESDPDADVSTEEAEAASWLLQTPANPKGPDLNSSHYSFTEIDATDLNFVCVDAKTDSPEQHSPGTADGVVPVQSHSKTVTEHYSDINNDFSTSKPFTYNYNHSVSSSSLEVGVVPDGNVMSEMSYCGYGRTEAVQITAADREARVMRYREKRKNRRFEKTIRYASRKAYAETRPRIKGRFAKRTDLNMNVNLIGEDESYDGYGVVPSC

SEQ ID NO: 711 - protein, 470 aa, Mesembryanthemum crystallinum
MNMRPALPMQTSGGNCFNELKVSGPYSSQLPVLPNPLEDFPKSPDPFAVSSSREMIPNPLQIQANPMVSHFGSSHNSSTYASGFPTDLHFPSFSPRERQSQNSPLGGGVAFPPSQNTSPDVQSAGFINYQKEDDDNSWSTGHLQDLLDFPEGIPVSNGQVGTSTEVMSNDNHVKRIGWRELTEDLYADSIEPNWNDFLADSNVADQQPKVTQPSSDVRVHQPLIQQQLSLPPREVSAAANQTSAAANQTSAAHSNRPRMRWTPELHEAFVDAVNQLGGSERATPKGVLRHMNVEGLTIYHVKSHLQKYRTARVRPESSEGNSERRASSVDPVSSVDLKTSVTITEALRMQMEVQKQLHEQLEIQRKLQLQIEEQGKYLLQMLENQNKVEKEKLNPDGSSAHNDKSEGSQPEPSREGAVISISSQGPGESSHGSKGKQKAPEADTTGDHHLEDGGSNPPPMKRARTDDSFL

SEQ ID NO: 712 - protein, 126 aa, Debaryomyces hansenii CBS767
MSKISDTALHNSDYEIKEQDRFLPIANVGRVMKKALPPHAKLSKESKECIQECVSEFISFITSHASDRGRLEKRKTLNGEDILWSMYILGFENYSETLKIYLAKYRQVCIFIHSVFIREAITKTLV

SEQ ID NO: 713 - protein, 271 aa, Glycine max
MDPPLITDSTFSPAYSLAEIWPGMPHFPPPFPHPSSADHSTLTDLTATPRKRKDCSSSSSSASAAAADEDDCSKVLSSTTTATANLFNNDSGSNKQMKLGGSSVENDGFKAEAEASSAGGNKSSEQSNKPCEAPKQDYIHVRARRGQATDSHSLAERARREKISERMKILQDLVPGCNKVIGKALVLDEIINYIQSLQRQVEFLSMKLEAVNSRMNMNPTIDGFPSKDVGTQPFDIAGMVFGSQAARGYAQGSSPPGWLHMQIGGGFERTT

SEQ ID NO: 714 - protein, 263 aa, Glycine max
  misc_feature (150)..(150): Xaa can be any naturally occurring amino acid
EWTPIIHLLISPHTTTPSTSTSTTTSSTTTTTTTLVLSLPSNLNFSDPHHYIPASDATTFKQHTPDFTSFSVEKSVEASKPVPPPRSSSKRSRAAEFHNLSEKRRRSRINEKMKALQNLIPNSNKTDKASMLDEAIEYLKQLQLQVQYLXLILQMLMMRNGLSLHPMSLPGGLRPMIMPQTGLNLDGSNGFQNSTCAIASSSNDESLVRHAFSFPKQCSISNKSIGVPSVKNIATSDTSSTFHPSIKDALYGNMPQPFMDTTK

SEQ ID NO: 715 - protein, 315 aa, Oryza sativa (japonica cultivar-group)
MDEQRGRGGFDELVLLHQQQEQRRRREQQQEEEEEEEVRRQMFGAVVGGLAAFPAAAAALGQQQVDCGGELGGFCDSEAGGSSEPEAAAGARPRGGSGSKRSRAAEVHNLSEKRRRSKINEKMKALQSLIPNSNKTDKASMLDEAIEYLKQLQLQVQMLSMRNGVYLNPSYLSGALEPAQASQMFAALGGNNVTVVHPGTVMPPVNQSSGAHHLFDPLNSPPQNQPQSLILPSVPSTAIPEPPFHLESSQSHLRQFQLPGSSEFHKILFLHVLLSVKDGVSWRDNAKAPPIITSRKSARKRDELHQERIIHVEHQ

SEQ ID NO: 716 - protein, 864 aa, Oryza sativa
MWGPGGGMATAEVGGGGGEGDAAAAAVARAGGGGGGGGGGEDALFTELWSACAGPLVTVPRVGEKEFYFPQGHIEQVEASTNQVGEQRMQLYNLPWKILCEVMNVELKAEPDTDEVYAQLTLLPELKRQEDNGSTEEEVPSAPAAGHVRPRVHSFCKTLTASDTSTHGGFSVLRRHADECLPPLDMSRQPPTQELVAKDLHGVEWRFRHIFRGQPRRHLLQSGWSVFVSAKRLVAGDAFIFLRGENGELRVGVRRAMRQQTNVPSSVISSHSMHLGVLATAWHAVNTGTMFTVYYKPRTSPAEFVVPYDRYMESLKRNYSIGMRFKMRFESEEAPEQRFTGTIVGMGDSDPAGWPESKWRSLKVRWDEASSIPRPERVSPWQIEPAVSPPPVNPLPVPRTKRLRPNATALPADSSAIAKEAATKVVVESEPNGTQRTFQTQENATPKSGFGNSSELESAQKSIMRPSGFDREKNNTPIQWKLGSDGWMQMSKPESYSEMLSGFQPPKDVQTPQGFCSLPEQITAGHSNFWHTVNAQYQDQQSNHNMFPSSWSFMPPNTRLGLNKQNYSMIQEAGVLSQRPGNTKFGNGVYAALPGRGTEQYSGGWFGHMMPNSHMDDTQPRLIKPKPLVVAHGDVQKAKGASCKLFGIHLDSPAKSEPSKSPSSVVYDGTPQTPGATEWRRPDVTEVEKCSDPSKAMKPLDTPQPDSVPEKPSSQQASSQQASRNMSCKSQGVSTRSCKKVHKQGIALGRSVDLTKFNGYEELIAELDDMFDFNGELKGPKKEWMVVYTDNEGDMMLVGDDPWIEFCDMVHKIFIYTREEVQRMNPGTLNSRSEDSHANSMERGSVGREMRGCLSTSSLNSENC

SEQ ID NO: 717 - protein, 72 aa, Triticum aestivum
HASAGSEGSSAGGSRGSALSRYMEKKKRRKFDKKIRYASRKARADVRKRVKGRFVKAGEAYDYDPLSDTRSY

SEQ ID NO: 718 - protein, 251 aa, Arabidopsis thaliana
MADPVLQSPKNSHFFQPLLPGFDSYLNIPVKFFSKRIQGRNEGRTVELRTDASEKTWQVKIQGRRLTVGWKEFASAHDFRVGDIIVFRHEGSLVFHVTALGPSCCEIQYVPSCNNQENISNLSMKQSIKTELESSLDEDKVNMGKFPRKKHVKKRIPEAEAKSFSSDKSCFVAHVTDSNLREDTLFLPRKFDRSDGLIKGSNKIVLMNEEARTWTLILKFRNSSRTFYMRGGWTSFSMSMGLNLEIPSRLN

SEQ ID NO: 719 - protein, 462 aa, Arabidopsis thaliana
MANASQLSPTNKHFFKPLLPGFQRNLNIPVKFFSEHIEGKHEGETVKLRADASKRTWEVKMDGNRLTEGWKEFVEAHDLRIRDFVVFRHEGDMVFHVTALGPSCCEIQYPQSISHEEGEESGEVEISEREVEENLQKEYDQSSADLNCFSQSVTHSNISNDLVTLPRDFAKRNGLDKGMHEIVLMNEEGKSWESEVRSRMSGQVFIVGGWKSLCSENKLKGGDSCTFKLLQNAKTPVFQLCSRIGESRFVKLTPTLNSLEIGKQHLPVSFTKGNGLIHPGEIILVDKDRVEWSMKLQVDNRGGMHIFGGNDWKSFCAANEVGAGESLTLELIRGGLSPLFKFFSKIEQPSFEAEDRRHKRARVHNGSQETDKGEPSRATKMGPELEKREKTAEKGEPSRASNKSSGKQGNLQKTQACSVTDHVAKVKESVVDTLTSIRRFQAELETMEQKLEDSLQEINKLS

SEQ ID NO: 720 - protein, 159 aa, Chelidonium majus
FMEAYCEMLTKYEQELTKPFKEAMLFLSRIECQFKALTVSSSSDSVGHDAVDRNGSSDEDVEASDNYIDPQAEDRVLKGQLLRKYSGYLGSLKQEFLKKRKKGKLPKEARQQLLEWWSRHYKWPYPSESQKIALAESTGLDQKQINNWFINQRKRHWKP

SEQ ID NO: 721 - protein, 208 aa, Nuphar advena
LGDAEVALIVFSTRGKIYEYSSDSSITRILERYERFSCAERDPSVTDLDSQESWCVEYKKLKSKFEQLQKTQRRYMGEDLEPLSVKELQQLEHHLDSSLKDIRSRKIQLLLDSISELRRKEKSLQEQNEAIQKKLREQEAALNCLQSARSEQPQSRTVGFLFNSHSPTPDSGAYQTRNREAEESPHQHLQTQTSINNMPPWTLRLMTE

SEQ ID NO: 722 - protein, 336 aa, Medicago truncatula
MEQDQCWIQTKRKYSMSNSNLASSLTNPSSSCYGDSWEEQAFAEDAAAGSLGGCIWPPRSYSCSFCRREFRSAQALGGHMNVHRKDRARLKQQPQNDQILYHNHHHHHHHELEIATHHVQNPLIQNVYNNNLFPNSPSCGLVYNKTNPNSHLDHFVSSTSSPSSASKALFGDETLISPFNSSESWLNLPGNDILCSTKFQLAVDNFDQKVSKGIIDARFRDKGGNDDESDVAMSLNLVLCRTHPLVEFESTKEEDFNCKKRKIDSSSNQLFSNSSTFDKQQNMQAKMFEFNPNSIEEVDLELRLGTRSKAFVNFFFFDSMAKSSIILNNCRVIMTL

SEQ ID NO: 723 - protein, 260 aa, Brassica napus
  misc_feature (18)..(18): Xaa can be any naturally occurring amino acid
  misc_feature (25)..(25): Xaa can be any naturally occurring amino acid
QLRFFFSSSWMKSKDPRXVRVSRAXGGKDRHSKVCTLRGLRDRRVRLSVPTAIQLYDLQERLGLDQPSKAVDWLLNAAKEEIDELPPLPVSPETFSLFNHHQAFLNLSQPPGQDSTQLGFKTNGCVEESNTTSSREETKNNHIGSYGTYQNMEQHQQQHTRFQADYPHHQHQLHSLVPIQSQFLVCPMTASSTTTTIQSLFPSSSSAGSRTMETTDPRQMVSHFQMPSMGSSSSSQNISTLYSLLHGGSNPMPSVQFNRK

SEQ ID NO: 724 - protein, 271 aa, Solanum tuberosum
MSTPMMCTSLGVIRKGSWTEEEDILLRKCIDKYGEGKWHLVPTRTGLNRCRKSCRLRWLNYLRPHIKRGDFDWDEVDLILRLHKLLGNRWSLIAGRLPGRTANDVKNYWNTNLLRKLNTSTKFAPQPQEGINTSTIAPQPQEGINTSTIAPQPQEGIKCGQANAIIRPQPQKFTSSMKINVSWCNNNSIVNNEEASKDNNDMQWWANILENCNDIGEGEAERTLPSCKEINCNEIDKTPSLLHDGGNSMQQGQGDGGWDEFSLDDIWNLLN

SEQ ID NO: 725 - protein, 256 aa, Solanum tuberosum
TPMMCTSLGVIRKGSWTEEEDILLRKCIDKYGEGKWNLVPTRAGLNRCRKSCRLRWLNYLRPHIKRGDFDWDEVDLILRLHKLLGNRWSLIAGRLPGRTANDVKNYWNTNLLRKLNTSTKFAPQPQEGINTSTIAPQPQEGIKCGKANAIIRPQPQKFRSSMKINVSWCNNNSIVNNEEASKDNNDMQWWANILENCNDIGEGEAERTLPSCKEINCNEIDKTPSLLHDGGNSTQQGQGDGGWDEFSLDDIWNLLN

SEQ ID NO: 726 - protein, 260 aa, Lolium perenne
MGRGRVELKRIENKINRQVTFSKRRNGLLKKAYELSVLCDAEVALIIFSSRGKLYEFGSAGTTKTLERYQHCCYNAQDSSSALSETQSWYQEMSKLKAKFEALQRTQRHLLGEDLGPLSVKELQQLEKQLECSLSQARQRKTQLMMEQVEELRRKERQLGEINRQLKHKLDAEGSSSNSFRAMQQITWAAGTVVDEGAGAYHMHHQQQPNHSAAMDCEPTLQIGYPHQFAAAEQAANNIPRSSAPGGENNFMLGWVLGAN

SEQ ID NO: 727 - protein, 259 aa, Solanum tuberosum
KGSWTEQEDFLLRKCIQIYGEGKWHLVPARAGLNRCRKSCRLRWLNYLRPHIKRGDFAPDEVDLILRLHKLLGNRWSLIAGRLPGRTANDVKNYWNTHFQKKLNIITPPPRPRPNPHLHIKHKSIVVTKNEIIRPQPRNFSNVKKNNSHWCNNKSMITNTLDKDDKRCKEIVVNISEKPTRENTSSIDDGVQWWTNLLENCNEIEEEVAVTNFEKTPTMLLHEEISPPLINGEGNSMQQGQSHDWDDFSTDIDLWNLLN

SEQ ID NO: 728 - protein, 381 aa, Glycine max
MAFDPDNLLLHPSAVDSSSSCSPSHLQFFLPPNPKLNPFDMGFLDPQASSSLPLLASETTHFTPPQTSTTTAFAGFQSLQEGSSNPLFLNRSNILRPLESLPPSGAQPTLFQKRAALRKNMNMSDNKKRKEKDEVVVEDVSFDGSGLNYDSDDLTESNYNDAKEKNGGGGVSSNANSTVTGLDQKGKKKGMPAKNLMAERRRRKKLNDRLYMLRSVVPKISKMDRASILGDAIEYLKELLQRINDLHNELESTPVGSSLTPVSSFHPLTPTPPTLPCRIKEELCPSSLPSPNGQPARVEVRLREGRAVNIHMFCGRKPGLLLSTMRAMDNLGLDIQQAVISCFNGFAMDIFRAEQCKEGQDVHPEQIKAVLLDSAGYNGMM

SEQ ID NO: 729 - protein, 505 aa, Oryza sativa
MDSSRDSEEERPQRKDNGEETENGEDGGNALSLKDVANELLGCVVHRQKMEAEWHIPSSPPNPKSASRLLPSLSITTPRPTPNQTPCGRDLAALAMPPPLSFLHLAANPTPLHASPLRRARLRHRLSLRTDHPSRRAVASASASAGENPSTPGGPIADVEMVRGKDGVWTARPPTVVVLWDLDNKPPRGPPFPAATALRDAASLLGRVVSVSAFANRHAFSHVPAWVADERRERRAMDRAERAGAASPPVPYSCAVCGRRFPTRPDLTRHFRQLHQRERNKKLSRLRSLKGKKRQKFRERFISGNTKYDDAARELLTPKVGYGLAAELRRAGVHVRTVSDKPQAADHALKRQVKHSVACGVDWLVLVSDDSDFTDTVRKARAADLRTVVVGDGCRALGSVADIWLPWDRVENGEVDEDMLRNGTHMGFRDEEEDEQDDDEFIVDWDTSDLDGVVDDIVATRTKLFGATTMSAFADEEIMDGILGVGINGGDMLWSSDDEDEDGYF

SEQ ID NO: 730 - protein, 534 aa, Arabidopsis thaliana
VNSTFSFFFFSRFHKNSLDLKLTAENNPTLITGYIKAAIVVLFTLWVIRVYDFWVGFKCMDGREAMAFPGSHSQFYLQRGVFTNLTPSQVASGLHAPPPPPGMRPMSNPNIHHPQASNPGPPFSMAEHRHSDFGHSIHMGMASPAAVQPTLQLPPPPSEQPMVKKKRGRPRKYVPDGQVSLGLSPMPCVSKKSKDSSSMSDPNAPKRARGRPPGTGRKQRLANLGETGRKWMNTSAGLAFAPHVISVGSGEDIVSKVLSFSQKRPRALCIMSGTGTVSSVTLREPASTTPSLTFEGRFEILSLGGSYLVNEEGGSKSRTGGLSVSLSGPEGHVIGGGIGMLIAASLVQVVACSFVYGASAKSNNNNNKTIKQEIKPKQEPTNSEMETTPGSAPEAAASTGQHTPQNFPAQGMSGWPVSGSGSGRSLDSSRNPLTDIDLTRGSSSIHYVSAVHIFVVVDFSLGMLKPDISGLRPELSVPYCNILNVTEPPHFQATQRDCNSFISLIKASFGFFKKKKKKNSRGGPVPNSLVRASC

SEQ ID NO: 731 - protein, 374 aa, Triticum aestivum
  misc_feature (270)..(270): Xaa can be any naturally occurring amino acid
  misc_feature (282)..(282): Xaa can be any naturally occurring amino acid
  misc_feature (327)..(327): Xaa can be any naturally occurring amino acid
  misc_feature (336)..(336): Xaa can be any naturally occurring amino acid
  misc_feature (339)..(340): Xaa can be any naturally occurring amino acid
  misc_feature (343)..(343): Xaa can be any naturally occurring amino acid
  misc_feature (345)..(345): Xaa can be any naturally occurring amino acid
  misc_feature (347)..(347): Xaa can be any naturally occurring amino acid
  misc_feature (349)..(349): Xaa can be any naturally occurring amino acid
  misc_feature (352)..(352): Xaa can be any naturally occurring amino acid
  misc_feature (354)..(354): Xaa can be any naturally occurring amino acid
MGRHSCCYKQKLRKGLWSPEEDEKLMNHITKHGHGCWSSVPKLAGLQRCGKSCRLRWINYLRPDLKRGAFAQDEEDLIVELHAVLGNRWSQIAAQMPGRTDNEIKNLWNSSLKKKLRQKGIDPNTHKPLTEADRSGAAPTISTERTSGSSDVNPSSAGALGNFGHLLSETAQSSMLLPVYDKKRPETPSLARPKVPAKELFLDQLTAGHESPSSCRSSGPTLYFPFQQQLGYSNECGSGDGANMNSLWFNQNDFSCNTISTVMPTVSPSXLSTPMGLNLPPXNHHHGGTGIGSAPFYWDGVNPSSSGSTGSSGSNSMGFEPQSTNSXLGNSVFPWXDIXXGQXKXTXVXLLXEXKWPDLLQGNPFKRPKSPIPI

SEQ ID NO: 732 - protein, 207 aa, Brassica napus
TSAGLAFAPHVISVEAGEDVVSKVMAFSQQRPRALCVMSGTGTVSSVTLRQPATTEASLTFEGRFEILSLGGSYLVNEGGGPKSRTGGLSVSLSGPEGHVLGGGIGMLIAASLVQVVACSFVYGGIAKPNNTNKTIKQENKPKEEHDNSEMEPTPANAPEEAHETPQDFSAQGMSGWPGSGEGSVSGSGRSLDSSRNLLTDIDLTRG

SEQ ID NO: 733 - protein, 325 aa, Brassica rapa subsp. pekinensis
MGRSPSSGDSRLKKGPWTPDEDEKLVKYVKKHGHSSWSALPKLAGLNRCGKSCRLRWTNYLRPDIKRGKSLRRREQTILNLHAVVGNKWSTIANNLPGRTDNEIKNFWNTHLKKKLIQMGVDPMTHRPRTDVLSSLSQLISLSSNLRGFVDQEQIMLKLQTEMAKLELFQYLLQPPSMYNNINPNDFDTRSLLSSIASTTNNNLNLGSYLQDFNSLPSLKTLNTNIGPSSVFPQNLDDNHFKFFNQRENLPVSPIWLSDPSSSNQSFLPSLDPSYSMADDLIRNQYVIEDVNSNLTSSSCQESGASVSAAWPDHLLDDSIFSHIP

SEQ ID NO: 734 - protein, 405 aa, Arabidopsis thaliana
MTTKRIDRDLPSSDDPSSAKRRIEFPEETLENDGAAAIKLLSLLLQCAEYVATDHLREASTLLSEISEICSPFGSSPERVVAYFAQALQTRVISSYLSGACSPLSEKPLTVVQSQKIFSALQTYNSVSPLIKFSHFTANQAIFQALDGEDSVHIIDLDVMQGLQWPALFHILASRPRKLRSIRITGFGSSSDLLASTGRRLADFASSLNLPFEFHPIEGIIGNLIDPSQLATRQGEAVVVHWMQHRLYDVTGNNLETLEILRRLKPNLITVVEQELSYDDGGSFLGRFVEALHYYSALFDALGDGLGEESGERFTVEQIVLGTEIRNIVAHGGGRRKRMKWKEELSRVGFRPVSLRGNPATQAGLLLGMLPWNGYTLVEENGTLRLGWKDLSLLTASAWKSQPFD

SEQ ID NO: 735 - protein, 436 aa, Ceratopteris richardii
MEDKSYVESKLGAPTWLSGAVQQQQVRASQQGTTNSAGSSFVNEATQQQQSHDTPRKWCGCEAGGQCVQCSFMHLSGGGAGGGGSSVAGNGIAMTANHNQQHSAAEAAGLLAIARSGGDLAQSGQGGRGNLLDLHSDTANSSDLVEGEHGGGEHGGGGHNQQDSQVLWQNARLKADITMHPLYDQLLAAHVACLRIATPVDQLPRIDAQIAQASQIVAKYAVLGQNNLLVGEEKDELDQFMAHYVLLLCTFKEQLQQHVKVHAMEAVMACWELEQSLLTLTGVSPGEGTGATMSDDDDDPAESDPSIYDPAFDTHDSGAFGPLIPTETERTLMERVRQELKNELKNGYKDRIVDVREEILRKRRAGKLPGDTTSVLKAWWHAHSKWPYPTEDEKARLVQETGLQLKQINNWFINQRKRNWHSNPSSTAAMKTKRKR

SEQ ID NO: 736 - protein, 383 aa, Picea abies
SRPCQGANKFEPANAHIGGGGAGHFVMEQFIPEQAVISDSSISSVKTEVCSGSGGTGVPGQFELIRRKEEGRCARAYAEPSFVVTPLVTSLPPQQQEARMVTSLAVDMDSSCSCKPIEADAMKAKIIAHVHYPRLVAAYIDCQKVGAPPDVVSELDELSQKCHAQQCVATISIGADPELDQFMEAYCEMFIKYQEELTKPFKEAMAFLKKIENQLGALTKGTIRTSSLDQGDERGDGAASSEEEDGSGGEVEFHEVDPHAEDRELKDQLLRKYSGYLSSLKQEFLKKKKKGKLPKEARQKLLDWWTRNYKWPYPSESQKIALAESTGLDQKQINNWFINQRKRHWKPSEEMQFVVMDSPNPHNAAFFLEGHLRTDGTAFSMDC

SEQ ID NO: 737 - protein, 433 aa, Picea abies
MEHLNTAAAQASSSLYGVGMAEYGDAGVSSMMALITQHEPHDSESIMSTRMPSSFSSFHGHADCLLSAAMFQASQGDHKLKRQPGMDQLVSEQAGMSDSSMPSVKTEVGSGLRNQLEFHREQTGNGYTDQSSNTPVNPLVTSLASQARGEAQMIPSWDANSPHFNVDNEEYAIKSKILAHPQYPSLLGAYIDCQKIGAPPEAVARLDALTREYQNQQRRTVSIGMDPELDQFMEAYCEILTKYHEELAKPFKEAMTFLMKIEAQFNSLGKGTIRISPPAENDKKTEGGGSSEEVEDGSGGETDFQEVDHHAVEDRELKDHLLRRYSGYLSSLKQEFMKKKKKGKLPKDARQKLLDWWSLHDKWSYPSETEKIALAECTGLDQKQINNWFINQRKRHWKPSEDMHFMVMNSHSPHSAALYVERHLMTEGYHLDC

SEQ ID NO: 738 - protein, 91 aa, Brassica napus
  misc_feature (49)..(49): Xaa can be any naturally occurring amino acid
  misc_feature (60)..(60): Xaa can be any naturally occurring amino acid
VECPLSSSSMDSFFYELMRDYDSCTHTYTCNPTGPVNTHTHTCVHVHTXILPDEADDTYXESSWSKSQNTPLANRAAVRKYREKKKAKAAS

SEQ ID NO: 739 - protein, 303 aa, Zea mays
IPHTPVSAHSLLLQFRQLIIIINRTQSSRFHSRMLLNPASEASVLDTIRQHLLEEPADESFGSLVADQWSGSLPFRTDDADDMVVFGALQDAFAYGWLPDGSFVHVKPEPVRSPDSSSYPCSYDGSPCFGLLDPEPPLTPGTTTPSSRGQEEAAAAMARGKHYRGVRQRPWGKFAAEIRDPARNGARVWLGTYDTAEDAALAYDRAAYRMRGSRALLNFPLRIGSGDKRPSPAPPEPATSSDSSSSSASGSHKRRKRGEAAAANMAMALVPPPSQLNRPAQPWFPAAPVEQAAMAPRVEQIVV

SEQ ID NO: 740 - protein, 478 aa, Desulfotalea psychrophila LSv54
MRTKYNNIQSKQGIIMCSYSILVVDDEPNYLIVLSELLRDEDLEVFTAGSGKAGLDICREVDLDLVITDMQMDGMDGMALLEQIKELNPDLPVLIMTAHAEVEKAVKAMQAGAFGYLAKPFANDELLVNIYRAARHYSLIRENKRLRHQLQSEDCFSGIVGKSPSMQRVYKLIRKVAPTPASVLITGESGTGKELVAQAVHSTSPRRDEAFIAVNCAALSANLLESELFGHEKGAFTGAASMRKGRFELAAGGTIFLDEISEIPLELQSKLLRILQEKSFERVGGAKTLHVDVRVISASNKDLKEEVAAGHFREDLFYRLNVIHLNLPPLRERLDDLPLLVAFFIEKYRKILQLENLVVGEEAMKLLLRLPWDGNVRELENTIERAAILCDAGNIMVEDVQPETVYNKEDHWQPGGDLSNFIPESVGLNEVLYAVEERMLIKALDESNQVQARAASQLGITKSLLQYKLKKYGLKKKK

SEQ ID NO: 741 - protein, 507 aa, Zea mays
PTSDSRCVHGFSPEEDLCEDRGDMSVTGEKPCTHRESDVGQTNSCSLNNSSECENHTPSNDEISEPESNLEMAKTDQGGDVPSGEKVLKKPDKILPCPRCNSMDTKFCYYNNYNIKQPRHFCKSCQRYWTAGGSMRNIPVGAGRRKSKSSSASCRSVLIPVPGSSSVANPGGEASLFPLSVKANQAAVSFGPDSPLCTSMASVLKIGGGGEQVKSCSPASAAAAAQPRNGETQTQTCAPSSAATTPSDGPGNGLQKGAESAHQNQNQNQNGIIGHSNGVTPVHPIPFFPGPPFVYPWSPAWNGIPAMAAAVCAAPATAEAEAAISSEHGTASSTVQWNVPPAIVPVLPPGFCGPIPVPVIPPPSVWPLITPWPNAAWSAPWLGPSASVPPGSSRSSGSGSSTCSDSGCGSGSPVLGKHSRESRPQGDEKAERRCLWIPKTLRIDDPVEAAKSSIWTTLGIEPGDRGMFRPFQSKHGRQQELQASGAARALQANPAALSRSQSFQETT

SEQ ID NO: 742 - protein, 208 aa, Glycine max
MYGQSSSSSSSYESDLALLDSIRHHLLGESESIFGAPNFGSGRSSSFSSLDSCLSDNWGELPFKEDDTEDMVLYGVLRDAVNVGWVPSLDAGSPESVSSGFPAVKLEPDLMPALISPCPPPRIAAEEKKVVPAKGKHYRGVRQRPWGKFAAEIRDPAKNGARVWLGTFETAEDAALAYDRAAYRVGTVQEQVGSQVAECTRGEQLLVS

SEQ ID NO: 743 - protein, 330 aa, Arabidopsis thaliana
  misc_feature (292)..(292): Xaa can be any naturally occurring amino acid
MEARCDFCGTEKALIYCKSDSAKLCLNCDVNVHSANPLSQRHTRSLLCEKCSLQPTAVHCMNENVSLCQGCQWTASNCTGLGHRLQSLNPYSDCPSPSDFGKIWSSTLEPSVTSLVSPFSDTLLQELDDWNGSSTSVVTQTQNLKDYSSFFPMESNLPKVIEEECSGLDLCEGINLDDAPLNFNASNDIIGCSSLDNTKCYEYEDSFKEENNIGLPSLLLPTLSGNVVPNMSLSMSNLTGESNATDYQDCGISPGFLIGDSPWESNVEVSFNPKLRDEAKKRYKQKKSKRMXGKQIRYASRKARADTRKRVKGRFVKSGETFEYDPSLVM

SEQ ID NO: 744 - protein, 198 aa, Gossypium arboreum
MAPKKDGVSKRVFNKGSWTAEEDRRLAKYIEIHGAKRWKTIAIKSGLNRCGKSCRLRWLNYLRPNIKRGNISDEEEDLIIRLHKLLGNRWSLIAGRLPGRTDNEIKNYWNSHLSKKIINHDVRTEQTSSSEQIVPHKAWETVQMEEEEVVKGSDEIENSEFSIDVDEFFDFTTEGCFSLDWVNKFLELDDQQDPLAMV

SEQ ID NO: 745 - protein, 351 aa, Medicago truncatula
MDGREAMAFSGGPGSYYMHRGGAGVAGSGSGGFQLPPPGFRPLPNTGIIAQPNARGQGGDTSSMFSLETQSHNSHANFNHGINIGASSGAPSSDPVKKKRGRPRKYGPDGSVSLKLSPTSAPAKSTQEDSTTPSEKRGRGRPRGSGRKQQLAALGDWMTSSAGLAFSPHVITIGVGEDIAAKLLSLSQQRPRALCILSGNGIVTSVTLRQPASTNIGVTYEGKFQILSLSGSYLVAEDSGPSNRTGGISVSLSSRDGHVIGGSVAKLIAGSLIQVVVCSFVYGGGSKVKTKQETAANGESSEPHNDDKLASPASAPPGQNYVSSLTGMWPGSQPSDVKSVHAHTGFDLTRG

SEQ ID NO: 746 - protein, 450 aa, Glycine max
MNMERYTLPAPPINIILEEEEEEENIAIAMGAPLIPSFKSMLQHQQQQPDSYFNFNFNSSISSATIPFVPNMESFPSLDPFSPSLSSLPFFNNNSSNNMAFDPGFDLGLDTTGLHSSVPPAPHLFSQAQMGFEFSELEALTGPGNGNNAPFADGAKVAAAMLLRPPPLDGAQQQQQQPTLYRKRRGTAAEIPGLETVRRKGRKWEEGGRGGEGEEGSSADVDGSGLNYESDEQNENNGNNGLKLSENNGGDNKGKRKGLPAKNLMAERRRRKKLNDRLYMLRSVVPKISKMDRASILGDAIDYLKELLQRINDLHNELESTPPGSLLTPSSTSFQPLTPTLPTLPCRVKEELYPGTLPSPKNQAAKVEVRVREGRAVNIHMFCTRRPGLLLSTMKALDNLGLDVQQAVISCFNGFALDVFKAEQCREGQDVLPEQIKAVLSDSAGFHGMM

SEQ ID NO: 747 - protein, 498 aa, Arabidopsis thaliana
MNKSNPAGSVTGSDIIDAKIEEHQLCGSKKCPSCGHKLEGKPQDWVGLPAGVKFDPTDQELIEHLEAKVLAKDFKSHPLIDEFIPTIEGEDGICYTHPEKLPGVTRDGLSRHFFHRPSKAYTTGTRKRRKIQTECDNNLQGSSSSGETRWHKTGKTRPVMVNGKQKGCKKILVLYTNFGKNRKPEKTNWVMHQYHLGTHEEEKEGELVVSKIFYQTQPRQCNWSSSTSSLNAIGGGGGEASSGGGGGEYHMRRDSGTTSGGSCSSSREIINVNPPNRSDEIGGVGGGVMAVAAAAAAVAAGLPSYAMDQLSFVPFMKSFDEVARRETPQTGHATCEDVMAEQHRHRHQPSSSTSHHMAHDHHHHHHQQQQQRHHAFNISQPTHPISTIISPSTSLHHASINILDDNPYHVHRILLPNENYQTQQQLRQEGEEEHNDGKMGGRSASGLEELIMGCTSSTTHHDVKDGSSSMGNQQEAEWLKYSTFWPAPDSSDNQDHHG

SEQ ID NO: 748 - protein, 511 aa, Arabidopsis thaliana
MKREHNHRESSAGEGGSSSMTTVIKEEAAGVDELLVVLGYKVRSSDMADVAHKLEQLEMVLGDGISNLSDETVHYNPSDLSGWVESMLSDLDPTRIQEKPDSEYDLRAIPGSAVYPRDEHVTRRSKRTRIESELSSTRSVVVLDSQETGVRLVHALLACAEAVQQNNLKLADALVKHVGLLASSQAGAMRKVATYFAEGLARRIYRIYPRDDVALSSFSDTLQIHFYESCPYLKFAHFTANQAILEVFATAEKVHVIDLGLNHGLQWPALIQALALRPNGPPDFRLTGIGYSLTDIQEVGWKLGQLASTIGVNFEFKSIALNNLSDLKPEMLDIRPGLESVAVNSVFELHRLLAHPGSIDKFLSTIKSIRPDIMTVVEQEANHNGTVFLDRFTESLHYYSSLFDSLEGPPSQDRVMSELFLGRQILNLVACEGEDRVERHETLNQWRNRFGLGGFKPVSIGSNAYKQASMLLALYAGADGYNVEENEGCLLLGWQTRPLIATSAWRINRVE

SEQ ID NO: 749 - protein, 231 aa, Momordica charantia
MSDSPQRKMGRGKIEIKRIENTTNRQVTFCKRRNGLLKKAYELSVLCDAEVALIVFSSRGRLYEYANNSVKATIDRYKKASSDSSNTGSTSEANTQFYQQEAAKLRVQIGNLQNSNRNMLGESLSSLSVKDLKSLESKLEKGISRIRSKKNELLFAEIEYMRKREIDLHNNNQLLRAKIAESERNASMIGGDFELMQSHPYDPRDFFQVNGLQHNNNHQYPRQDNMALQLV

SEQ ID NO: 750 - protein, 226 aa, Nuphar advena
MGRGKIEIKRIENTTNRQVTFCKRRSGLLKKAYELSVLCDAEVSLIIFSSRGRLYEYSNNSVKATIDRYKKACADSSNSGTVSEANAQYYQQEAYKLRQQISKIQQDNRQMLGEGINEMSVRDLKTLEGKLEKSIGKIRSKKNDLLNSEIQYMQKMGDDLQEENMYLRAKISENERAHQQQHISMMAGPSEYELLPTTFQHVNLLEPSHHHYSHQERTALQLGRDF

SEQ ID NO: 751 - protein, 223 aa, Amborella trichopoda
MGRGKIEIKRIENTTNRQVTFCKRRNGLLKKAYELSVLCDAEVALIVFSSRGRLYEYANNSVKTTIDRYKKACADSSHSGTVSEANSQYYQQEAAKLRNQIQVLTNTNRQLMGDSVGSMTVKELRTLENKLEKGISKIRSKKNELLFAEIDYMQNRELELQKDNMLLRAKIAENERAQHMNMLPGPEYDVLPPFDSRNYLQVNLLEPNHHNYSHQEQTALQLG

SEQ ID NO: 752 - protein, 287 aa, Oryza sativa (japonica cultivar-group)
MDAAAMERMAKHYWALWGAGVRSGWPAAAHGGGAEPSWEEKAFAQDAAGHLGGCVWPPRSYTCSFCRREFRSAQALGGHMNVHRRDRARLRQCDDDDDDPIPPTVSICAPPPPPPPPPPLLPAAAAAPDSPSPPSLLLQISSPKSTTADHHQNHQQLQLQGTNSSPNSCIATIIKESRNKARLFITTMPAPAPATTHDLGLGGGKDDDDSISISMEEIRRKRRRVDQPLTPTPSYSSERERRREDDPAAADASNNKVIPSSSILVNQLAMDMVGRQEIDLELRLGST

SEQ ID NO: 753 - protein, 261 aa, Pinus radiata
MGRGRVQLRRIENKINRQVTFSKRRNGLLKKAYELSVLCDAEVALIIFSTRGKLYEFASSSMNKTLERYEKCSYAMQDTTGVSDREAQNWHQEVTKLKGKVELLQRSQRHLLGEDLGPLNVKELQQLERQLEVALTHLRSRKTQVMLDQIEELRQRERLLHEVNKSLQKKLSETEGRDVITGIEQTSNTNTGTNGPWDSSITNTAYALSHPQQDSNSSLHHVDCEPTLQIGYQPVAPESIVPPHQPPHNQTPNQYMQGWWV

SEQ ID NO: 754 - protein, 217 aa, Magnolia grandiflora
NGLLKKAYELSVLCDAEVALIVFSSRGKLYEFGSAGINKTLERYQRCCYTFQDANITDRDTQGWYQEVSKLKAKCDSLQRSQRHLLGEDLGPLSVKELQKLERQLESALTQTRQRKTQIMLEHMEALREKERQLGDINKELKNKLEAKGQGAFRAMQGSWESGPLVGNNGFPMHPSQSAAIECEPTLQIGYHSFAAPEANIPRTAVAESNFMHGWIL

SEQ ID NO: 755 - protein, 422 aa, Zea mays
MCGGAILSGFIPPSGVAAAAAAAKKKQQQRCRVTADLLWPGPGSKEAPQDQEEDFEADFREFERGLGEDDVDSAGEGGDPEVQELPPPEPTRFAFATAAKAAVDGVMTTPPKDVQGDRAVKKRGRKNQYRGIRQRPWGKWAAEIRDPNKGVRVWLGTYNTAEEAARAYDAEARKIRGKKAKVNFPDDDAPPGTRHRPAPKACADEMFNNLKNDDDNNDDLFAMFAFGDNKKKVPAAKPAAAEGDSGSGSFLVPAPAVAAVPGNKRRSSATNIMLSVSDDQSSNSYGSGSSDLVGSWSWDDDAAAAAMTSDYTSSVFAPDNAVLPAASYSYMQGGAPKRMRSSYGGAPPSLAHDAAMPGFGLDKVSYHYQALPPYYVGSSNASVGNLGLLQQADDAPAPQDGASAGDIWSLDELLMLAAAGAY

SEQ ID NO: 756 - protein, 123 aa, Triticum aestivum
LITIHLLHAPTPRHASVQRRGSWFHSHRASEELLPESEMARPQQRYRGVRQRHWGSWVSEIRHPLLKTRIWLGTFETAEDAARAYDEAARIMCGPRVRTNFPDNDAAPSSSFLSPALVAKLHR

SEQ ID NO: 757 - protein, 241 aa, Amborella trichopoda
MGRGRVELKRIENKINRQVTFSKRRNGLLKKAYELSVLCDAEVGLIIFSSRGKLYEFGSAGLSKTLERYQRCCYTPQDNSATDRETQNWSQELSKLKAKYETLQRSQRHLLGEDLGPLSVKELQQLERQLEVALSQARQRKTQILMDQMEELRRKERRLGDINKQLKSKLESDGQGSFRGIQGTWESGTVVGNNAFAVNPSHANPIDCEPTLQIGYHHFVSPESIPRTGPAESNFVQGWVL

SEQ ID NO: 758 - protein, 417 aa, Ipomoea nil
MLKEESCEVLDLDVTIGSSSGSRSGNKQNWARVCDICRSAACSVYCRADLAYLCGGCDARVHGANTVAGRHERVLVCEACESAPATVICKADAASLCAACDSDIHSANPLARRHHRVPILPISGTLYGPPTSNPCRESSMMVGLTGDAAEEDNGFLTQDAEETTMDEDEDEAASWLLLNPNPNPNPNPVKSNNSTNMCKGGNNNNNEMSCAVEAVDAYLDLAEFSSCHNNLFEDKYSINQQQNYSVPQRNMSYRGDSIVPNHGKNQFHYTQGLQQHNHHAIFNCKEWNMRILTRDMVSISSMDVGVVPESTLSDTSISHSRASKGTIDLFSGPPIQMPPQLQLSQMDREARVLRYREKKKTRKFEKTIRYASRKAYAETRPRIKGRFAKRTDVDTEVDQIFYAPLMAESGYGIVPSF

SEQ ID NO: 759 - protein, 339 aa, Arabidopsis thaliana
MEQAALKSSVRKEMALKTTSPVYEEFLAVTTAQNGFSVDDFSVDDLLDLSNDDVFADEETDLKAQHEMVRVSSEEPNDDGDALRRSSDFSGCDDFGSLPTSELSLPADDLANLEWLSHFVEDSFTEYSGPNLTGTPTEKPAWLTGDRKHPVTAVTEETCFKSPVPAKARSKRNRNGLKVWSLGSSSSSGPSSSGSTSSSSSGPSSPWFSGAELLEPVVTSERPPFPKKHKKRSAESVFSGELQQLQPQRKCSHCGVQKTPQWRAGPMGAKTLCNACGVRYKSGRLLPEYRPACSPTFSSELHSNHHRKVIEMRRKKEPTSDNETGLNQLVQSLQAVPSF

SEQ ID NO: 760 - protein, 628 aa, Arabidopsis thaliana
MMFNEMGMCGNMDFFSSGSLGEVDFCPVPQAEPDSIVEDDYTDDEIDVDELERRMWRDKMRLKRLKEQDKGKEGVDAAKQRQSQEQARRKKMSRAQDGILKYMLKMMEVCKAQGFVYGIIPENGKPVTGASDNLREWWKDKVRFDRNGPAAITKYQAENNIPGIHEGNNPIGPTPHTLQELQDTTLGSLLSALMQHCDPPQRRFPLEKGVPPPWWPNGKEDWWPQLGLPKDQGPAPYKKPHDLKKAWKVGVLTAVIKHMFPDIAKIRKLVRQSKCLQDKMTAKESATWLAIINQEESLARELYPESCPPLSLSGGSCSLLMNDCSQYDVEGFEKESHYEVEELKPEKVMNSSNFGMVAKMHDFPVKEEVPAGNSEFMRKRKPNRDLNTIMDRTVFTCENLGCAHSEISRGFLDRNSRDNHQLACPHRDSRLPYGAAPSRFHVNEVKPVVGFPQPRPVNSVAQPIDLTGIVPEDGQKMISELMSMYDRNVQSNQTSMVMENQSVSLLQPTVHNHQEHLQFPGNMVEGSFFEDLNIPNRANNNNSSNNQTFFQGNNNNNNVFKFDTADHNNFEAAHNNNNNSSGNRFQLVFDSTPFDMASFDYRDDMSMPGVVGTMDGMQQKQQDVSIWF

SEQ ID NO: 761 - protein, 210 aa, Gerbera hybrid cv. 'Terra Regina'
MGRGKVQLKRIENKINRQVTFSKRRGGLLKKAHEISVLCDAEVALIVFSAKGKLFEYSTDSCMENILDRYEQYSNIDRQHVAVDTDSPIRWTQECNKLKSRAELLQRNLRHYMGEDIESLGLREIQNLEQQLDTALKRIHSKKNQLLHQSISELQKKEKAIQEQNNTLIKNIKEKEKTITQKAQWEPHNYGPNTTPLLFSLPPHSSLNIG

SEQ ID NO: 762 - protein, 288 aa, Oryza sativa
MELGGNNMGPDNGANNNSNLAARQRLRWTNELHERFVEAVTQLGGPDRATPKGVLRIMGVQGLTIYHVKSHLQKYRLAKYIPDSSADGNKAENKDPGDLLAGLEGSSGLQISEALKLQMEVQKRLHEQLEVQRQLQLRIEAQGKYLKKIIEEQQRLGGVKSETPAAGASVTLPSDQFPDSERTDPSTPAPTSESPTQGVPSNRDNGGQNEATKSPQRDDSLSRHEPLTPDSNCQPGSPTASPKHERAAKRQRGNGAEFSETDFALPHSIFESSSGSEFQQCSMSYSGH

SEQ ID NO: 763 - protein, 242 aa, Pinus resinosa
MGRGRVELKRIENKINRQVTFSKRRNGLLKKAYELSVLCDAEVALIIFSSRGKLYEFGSAGMLKTLERYQKCSYVLQDATVSDREAQNWHQEVGKLKARVELLQRSQRHLLGEDLGPLSIKELQQLERQLEVALTHVRSRKTQVMLEMMDELRRKERILQEVNKSLRKKLQEAEGQAFNAMQPPPHAWDSHAVANNAYAMQHPSNAVDCEPTLQTGYQYAPPESSMPRHEQAQNNYMQGWMV

SEQ ID NO: 764 - protein, 554 aa, Zea mays
MADTPTSRMVHPFGDVPRQTPKQFLYSGNPQHLCHPYQSAPDTHVVPQRRYTVRSQSHSPNNAGSQDHETHKQYTLESSAASGCSRHGSPSSQSVHAGSGSPVSHDDSHSGSTNGHGSPVSASCVTGEDPTDLKQKLKDLEAVMLGTSETDPEIVNSLEISAANQLSLEPEEWEHMVSMPRGNLKELLIACARAVERNNSYAIDLMIPELRKMVSVSGEPLERLGAYMVEGLVARLAASGSSIYKALKCKEPRSSDLLSYMHFLYEACPYFKFGYMSANGAIAEAIKGEDRIHIIDFHIAQGAQWVSLLQALAARPGGPPFVRVTGIDDSVSAYARGGGLELVGRRLTHIAGLYKVPFQFDAVAISGSEVEEEHLGVVPGEAVAVNFTLELHHIPDETVSTANHRDRILRLVKGLSPKVLTLVEQESNTNTAPFAQRFAETLDYYTAIFESIDLALPRDDRERINIEQHCLAREIVNLVACEGEERVERHEVFGKWKARLMMAGFSPSPLSALVNATIKTLLQSYSPDYKLAERDGVLYLGWKNRPLIVSSAWH

SEQ ID NO: 765 - protein, 412 aa, Glycine max
LFYLDPEAEVVALSPKTLLATNRFICEICNKGFQRDQNLQLHRRGHNLPWKLKQRSSKDIIRKKVYVCPEPSCVHHEPSRALGDLTGIKKHFCRKHGEKKWKCDKCSKKYAVQSDWKAHSKTCGTREYRCDCGTLFSRRDSFITHRAFCDALAEESARSVTGIVANSTTQPTEAAGVVISSSSLHQDMIHASNNNFPLKKEQQGCIPHWLGQPSPSSASSSFLFSHQDHHLHENPNPRGGPTLLPPPYHQTAPHMSATALLQKAAQMGATMSKTGSMIRTHQQQAHVSANAALNLSSRDHQMNPTPHDLLPFGNNKAVDNGVGVSPSLLHHVINSFSSSPFEGTFEDTFGGGDAMTADEGGGGGAGGNNNEGLTRDFLGLRHLSHTDILNIAGVGNCMNSSQHNQTRNPWQG

SEQ ID NO: 766 - protein, 235 aa, Zea mays
  misc_feature (184)..(184): Xaa can be any naturally occurring amino acid
MISGNLTNEDLGAGRTKAEGPTTAAGAVVAKSPVLPSSRHWPPSTESRIVRVSRVFGGKDRHSKVRTVKGLRDRRVRLSVPTAIQLYDLQDRLGLSQPSKVVDWLLDAAQHEIDKLPPLQFPPQAAQDLVAHLPPPSMVAPFAADRADGDKRHCHGGVKGLMGLNNSIRLVNATMPLAHGLYYXPLVFYSPEGGGFTMKEEATGYQFPVQNSLDHSQGQLSLSSARSFLRPGNQG

SEQ ID NO: 767 - protein, 496 aa, Lemna gibba
  misc_feature (305)..(305): Xaa can be any naturally occurring amino acid
  misc_feature (324)..(324): Xaa can be any naturally occurring amino acid
MERGREAAMHREADAGPSSLAIVPAEGQRGSISDAVASSLQQHRVIRWERFLPRRSLRVLLVEPDDSTRHIVTALLRKCSYHVASVADGIKAWDIVKEKNFNFDIILSEVEVPSFSGISLLTKIMGTELSRSIPVIMMSSQDSVSVVFKCMQKGAVDFLVKPVRKNELRNLWQHVWRRHCSTRYPNGAENGANNPSASENMSNNNGAGNEMKDSRMAEGCDDNDDQSSGSNPLIHIESTRTNEARAVEENKPSTEKAEEEEASVASKSKMDTDFRINDFSHPRVKNGFHEKHVLNHSAASASLGXFSTYYPVSVNRLPLLFRYXNTRICLPAHKSRSTLVAQESQSQSQRPELESQERSRNGEAVIRQRQGMIPFPFTVNSPIPFQNFCPGYGPLVQPVFYQDGGVHEESQTPSPGRRPGTESEEQRIEAERSGFDCDPNRSHREAALMKFRLKRKDRCFEKKVRYHSRKMLAEQRPRVKGQFVRQTADPTDAESV

SEQ ID NO: 768 - protein, 175 aa, Taraxacum officinale
DQFMEAYCEMLIKYEQELSKPFKEAMLFLSRIESQFKAISFSPSDSGCGEGGMDRNGSSEEDLDVDVNNNNLVDPQAEESELKGQLLRKYSGYLGSLKQEFMKKRKKGKLPKEARQQLLDWWTRHYKWPYPSEAQKLALAESTGLDQKQINNWFINQRKRHWKPSEDMQFVVMDA

SEQ ID NO: 769 - protein, 1232 aa, Chlamydomonas reinhardtii
MASDLANIFNDEEAGSDRANSITSSDLDPFLLQGDDQTWAVEDWNWDPFNMFAAPKETPNVACCQALKRRKVTEQSATSAPQQAAQQHHQHAACQPCHGASGSRAGPPAAPTAACCSMAPGVQQHAPAPAPAQQLTGPLQTALNSMMPGQQQQRVADACGVSNMCHAPGMVAPPPPMPVAAPLAATGHQAGGMGMGHMNPAMGHMGWPAMPDMSNPAAAAAAAAAAASFFPTMGAGGRGPLATMGWGAQPMALQMPSMGLPGFPGGHTQCAPALQMPAVAFPTPSSGIFHQQASMAVPPSALPSPALGCSGDTTSLQGSADNCAKPPCCSGNRATGPTCSGGRQQADSSNKAAPPPPKQPAQNTVGARGGAAAPAPGDLSDFNISDSEDDDEVARRPSAAGTQRGGVGNAAALNAAAYANLGDIVSLQDVGDDTGAMVCQVPGCGKDLTNLKEYHQRYRICDVHIKLQQVLKDGRLQRFCQQCGRFHDLTAFDGNRKSCRDQLSKHNARRRRRAQAEQAKGRAAAQEAAVAAAGAMAAAAAVGGAAGGAPAVPGFEGGDVGKLLACLMQNPTQLHALRLLLGVPTHPALPAAAPAAGLGMAAGGDTAAQPDQARTYGLARDILAGRNEFSPAFESEHRMIRLSMKLFNKTPADLPHDLRNQVTSWLASAPLAMEASIRPGCVFLTVQMLVDEAGAQQAAAPGALHGLVEHLLTRTGCPFWHMGMYTVQMGTDMLLVRDGKMAGDANVNASGAAAPAATGEGAEAAARVRGDGRFPVVRRLGPLAAVAGQPTVLKLHGLNLDAPGCSVILRWGNKHLKAHMQALSTHRAIVRLPPLPDLCGPVWVEVARGAYLSPAKQLLVARNEELVQEINKLDVKTGPLRHDTVELLLQDLALVLQHIAAQPGVAAQLQHAVIALKARRLLAMACDMGWAAVASAVLPLACARCSCASEMVAAIHSASTPSQTGAADKRGLTLLHRAVRSGSVSLLAGMLAWGDSHGYRWRVDAEGPAGITPLHLSAMLDDARIGLLLLDHCGWPAAFTHLRSDGGVTPFHLAFQMGHYQVDALMSALGGLHQVADPNNAAAINNAAAAAAAAMSPSRRSRCGNAAAMGCKPDPDEDVKPDLAALQRGGRNGGGGSGGCTELDPCENCHCTLPPLLLSIMASCTDCGRRRMCMETECNNAAQRCGDCGCGGARPTARVDSGEVCSSRQHGTIFSITALCQGCHANRTLAVA

SEQ ID NO: 770 - protein, 267 aa, Helianthus annuus
MENSEAIEHEHDFSCIDRSMSFQNEDSGDISPQRRIGKGKIEIKRIENTTNRQVTFCKRRNGLLKKAYELSVLCDAEVALIVFSSRGRLYEYANNSVRGTIDRYKKSCLDPPSTGSVAEANAQFYQQEATKLRQQIANLQNQNRQFYRNIMGESLADMPGKELKNLESKLEKAINRIRAKKNELLFAEIEYMQKRELELHNSNQFLRARISENERAQQQHMSLMPGSSGYNDLGPHQSFDGLNDLQTNELQLNNNYSCQDQTPLQLV

SEQ ID NO: 771 - protein, 247 aa, Helianthus annuus
MSFPNESGEMSPQRKLGRGKIEIKRIENTTNRQVTFCKRRNGLLKKAYELSVLCDAEVALIVFSSRGRLYEYANNSVKGTIDRYKKACLDPPSSGSVAEANAQFYQQEAAKLRQQIANLQNQNRQFYRNIMGESLGNMPAKDLKNLEGKLEKGISRIRSKKNELLFAEIEYMPKRENELHNNNQFLRAKIAENERSQQQHMSLMPGSSDYDLVPPHQPFDGRNYLQVNDLQPNNSYSCQDQTPLQLV

SEQ ID NO: 772 - protein, 161 aa, Dendrobium nobile
ELDEFMEMYCDVLVKYRRDLERPFDEATAFLNTMEVQLSDLCKPTCRPTLGPYVSDEAVGSSDEELSGGEGEAPESHLKGEERDLKEKLLRKYSGYLSSLKQEFSKKKKKGKLPKEARQILFEWWTAHYKWPYPTEADKIALAEATGLDQKQINNWFINQR

SEQ ID NO: 773 - protein, 202 aa, Glycine max; identical to SEQ ID NO: 153

SEQ ID NO: 774 - protein, 270 aa, Oryza sativa
MEDQMANLRLTDFEFFRIILPGSSKTKLKLPYKFARELGDRELREARLRVAGEGRRPWDVKVFDDDVSGDVYLGRGWQEFARAHDLRDGHFLVFRYDGAAAFTVTVFDETMCRRDYRRHHDAAESGSSSSSDSSDAAAAVATAAAEGVGDVALSQFAVTLRQCNLEDKQAQYLNVPMEFQEAHEYARREKVVLRMRGEAWTVRLKHSRRERGQRTAFRYGWHRFCVDNGLAVGDTCFFRVLREGDLRRGGAADDHVLKVAVRKADGTTLE

SEQ ID NO: 775 - protein, 124 aa, Pinus strobus
EIEVHEVDPRAEDRELKDQLLRKYSGYFNSLKQEFLKKKKKGKLPKEARQKLLEWWNVHYKWPYPSETDKVSLAESIGLDQKQINNWFINQRKRHWKPSEDIQFVIMDSLNPHGASFYMDGAEC

SEQ ID NO: 776 - protein, 162 aa, Zea mays
  misc_feature (29)..(29): Xaa can be any naturally occurring amino acid
MARPQQRYRGVRQRHWGSWVSEIRHPLLXDRARLGLKARIWLGTFETAEDAARAYDEAARIMCGPRARTNFPADANGPPPSFLSAALVDKLHRFNLASVQAAQRQREAAAAAAAAAATSAPATPPTPPATQWGGGGRSLEEQHVEQMIEELLDSDFSMEICC

SEQ ID NO: 777 - protein, 688 aa, Craterostigma plantagineum
MEQDNQMLELSSAMNTIIGGDGDGENRELWLDGEDDDQDNLLLGVNEDSIFYTDFPSLPDFPCMSSSSSSSSNPKPIVSATTSSSAASSSWAAAMKSETAAAISSTASMEVQAPATLSDLDCCIDAMENFGYMDLIDVNEIWGGDDDPSDPVFAGDAEQTPAVIPAVDAPHQQLTFDSSPPPQENQRVITMAAQQSQENDGLTTLLQENSELAVIFFEWLKQNKDNISAEDMRSIKLRRSTIDNASKRLGSSKEGKIKLLKLILGWVEQCQLQKKKTNKVGGENSSQEISNSDPNQNPSHNFPYNPDCCFSTPPPPTPWLPPPPQETPAPASFPASYPQPPPMPMYPYDPYVNTVHHQIPPIPYPPPFVEYPPPPPMMEAQPWAAVAAPPYAVAAQPQFGAFPEPNFYACNPYQMCDLSGERFVKLGASATKEARKKRMARQRRLYSSHHRHGHHHHGHQIAPADANSMENHQNGGGDRSSPGNSSWMYNNVGASSNVVIQNVDSTQPSSGDKMAAQAQSSNQRLGSNDRRQQQQQQGLKTEKNLKFLLQKVLKQSDVGSLGRIVLPKKEAEIHLPELETRDGISVAMEDIGTSRVWNMRYRFWPNNKSRMYLLENTGDFVRLNGLQEGDFIVIYSDTKCGKYMIRGVKVRPGTKLESKKPAKKNARSPSIVGNNESSSPVQIKQAVL

SEQ ID NO: 778 - protein, 347 aa, Lycopersicon esculentum
MGRVPCCDKMGVKKGPWTPEEDIMLVSYVQQHGPGNWRALPTKTGLRRCSKSCRLRWTNYLRPGIKRGNFTDQEEKMIIQLQALLGNKWAAIASYLPERTDNDIKNYWNTHLKKKMKRLDQCHGSNDLFSLENGLTHLSSSNSSTSRGQWERTLQADINMAKKALHNALSLENPTSSHNNNIKQENTQVSSTSTIYASSTENIARLLQGWIGSSTSSTNNSESSKTSSNNIATTDSSSCDGTPNAETKGGMGLMEAFESLFGLESFESSSSDELSQTTTPEAIKIEIKKEENEHDVEVPLSIILENWLLDENTLNIQPKNDLTTLISFDETPQLFYKFFFLLILLME

SEQ ID NO: 779 - protein, 628 aa, Zea mays
MKREYQDAGGSGGDMGSSKDKMMAAAAGAGEQEEEDVDELLAALGYKVRSSDMADVAQKLEQLEMAMGMGGVGGAGATADDGFVSHLATDTVHYNPSDLSSWVESMLSELNAPPAPLPPATPAPRLASTSSTVTSGAAAGAGYFDLPPAVDSSSSTYALKPIPSPVAAPSADPSTDSAREPKRMRTGGGSTSSSSSSSSSMDGGRTRSSVVEAAPPATQASAAANGPAVPVVVVDTQEAGIRLVHALLACAEAVQQENFSAAEALVKQIPMLASSQGGAMRKVAAYFGEALARRVYRFRPPPDSSLLDAAFADLLHAHFYESCPYLKFAHFTANQAILEAFAGCRRVHVVDFGIKQGMQWPALLQALALRPGGPPSFRLTGVGPPQPDETDALQQVGWKLAQFAHTIRVDFQYRGLVAATLADLEPFMLQPEGDDTDDEPEVIAVNSVFELHRLLAQPGALEKVLGTVRAVRPRIVTVVEQEANHNSGTFLDRFTESLHYYSTMFDSLEGAGSGQSADASPAAAGGTDQVMSEVYLGRQICNVVACEGAERTERHETLGQWRSRLGGSGFAPVHLGSNAYKQASTLLALFAGGDGYRVEEKDGCLTLGWHTRPLIATSAWRVAAAAAP

SEQ ID NO: 780 - protein, 189 aa, Arabidopsis thaliana
MAKEGLALEITELRLGIPGDNYSEISICGSSKKKKRVLSDMMTSSSLDTENENSVVSSVEDESLPVVKSQAVGWPPVCSYRRKKNNEEASKAIGYVKVSMDGVPYMRKIDLGSSNNYINLVTVLENLFGCLGIGVAKEGKKCEYIIIYEDKDRDWMLVGDVPWQMFKESCKRLRIVKRSDATGFGLQQD

SEQ ID NO: 781 - protein, 618 aa, Hordeum vulgare subsp. vulgare
MKREYQDGGGSGGGGDEMGSSRDKMMVSSSEAGEGEEVDELLAALGYKVRASDMADVAQKLEQLEMAMGMGGPAPDDGFATHLATDTVHYNPTDLSSWVESMLSELNAPPPPLPPAPPQLNASTSSTVTGGGGYFDLPPSVDSSSSTYALRPIISPPVAPADLSADSVRDPKRMRTGGSSTSSSSSSSSSLGGGAARSSVVEAAPPVAAAAAAPALPVVVVDTQEAGIRLVHALLACAEAVQQENLSAAEALVKQIPLLAASQGGAMRKVAAYFGEALARRVFRFRPQPDSSLLDAAFADLLHAHFYESCPYLKFAHFTANQAILEAFAGCRRVHVVDFGIKQGMQWPALLQALALRPGGPPSFRLTGVGPPQPDETDALQQVGWKLAQFAHTIRVDFQYRGLVAATLADLEPFMLQPEGEEDPNEEPEVIAVNSVFEMHRLLAQPGALEKVLGTVRAVRPRIVTVVEQEANHNSGSFLDRFTESLHYYSTMFDSLEGGSSGGPSEVSSGGAAPAAAAGTDQVMSEVYLGRQICNVVACEGTERTERHETLGQWRNRLGNAGFETVHLGSNAYKQASTLLALFAGGDGYKVEEKEGCLTLGWHTRPLIATSAWRLAAP

SEQ ID NO: 782 - protein, 1297 aa, Oryza sativa (indica cultivar-group)
MNEVIAKDVHGRPVPKPDDALSGGWIPSSIETMTVAIEGQRLLQHDVKMQPIDTPTVLAAFFSAWTVAPSGAQERLPNIVASGPITDAGNRTRPAVAWHHTIDTTDDGIALPAADEAASCSPSSSWGRKMATPLLPAVTTLVLAKRRGHGSHDQGLRFRQPLPFQAPTEFKISRNPVENRAILKLDDEVRDLKCTFSHSCYTPSPVQPRPMATVSPGLFSYYDPIPIGRSRCADQKGPTHFAGPPPGPARRAAVKSSCAAGLAAPLPRRAPVHVAAGSRAHTTVPWRLYRCPSATPPPDRKGGRHDICIAGVLLFSCNSSHRRRASRTGEKTTATQKRKRSIQTHASFLYSTAVFVTHMHKDKSLIINKHQDKTGWVRQATLLQAVNRPIAPISDQPQEIEQPRWGERAPDRYYSIEWMPKEPRRSRIHWLLTNASATESFRWTRVGQLDARPRPRFATNAAALLPFTTGWDQFVRTCSESDTLSLMNNLTCDIFMGFFTCRHGIISMNNASLCNCRLALQLTSTIDRMQKQSKAKQSSTHNFYAFCTAFSLTRLSAANADDARCWCRHLNSLVKPPENATWGPWTGATYVKRAGRSFPPLTSSIDPMQRKRRMESRWVIRRFCETSVSTCIQLLENQSTELLVDNSLATMITYLNQSNQFSNQFAVNKQARERIDDRGNSGSPTKKKEQPKLEEASQDQVSWLARSRYIVHDDRRSRKRKARRGLRGQATEPAVRVRLRSLPPHHPATLDSAAWVGTHVPHTKTKRLDRSDDGDPRRWRHDASAVAARARRLHGWMDGRIVRMQRARGRDGDTPPNARARARYSYFLSTLSSRGRRQPCDSRLHDKNQTMLYILYYDRVILEGVWIPPKNCTPKNCQNLVLCHISYRRTRTKRTTGPLKNQKGVEKTERRICGHAAVDDRCFPFSDPPRMIAIYSRTAAEVAGVLGKLPHIYPTTTGQRLIDIATASVRCRRRRRRGGGGGSYVGCGHRSRARRQARTHAIQMRHQLFDRSIDRHCRFGELDWANFGFLGRAGLQRCGKSCRLRWINYLRPDLKRGSFSQQEEDLIVALHEILGNRWSQIASHLPGRTDNEIKNFWNSCLKKKLRQRGLDPATHKPIAAAAAAATSSESAVTQVDEDHKPHGAAAAAADGLAANAKQSVFDPFPVTDFGAGFDLGAANMAAALYGSHPDDGAGFVADYSSVLDVSENLGYGESSSNSSNWTCAEVSNVLDSEVLNWAASAGADAAAKAEPFADMEQQHSGYGGEYQVEDDATLEHKFSLPCHEQSLAQFDFNLEYF

SEQ ID NO: 783 - protein, 251 aa, Helianthus annuus
MGRGKVQLRRIENKINRQVTFSKRRGGLLKKAHEISVLCDAEVALIVFSNKGKLFEFSTDSCMESILERYERYCYSERQLVATDATPRSWTLEYNKLKSRAELLQRNHRHYMGEDIESLSLKEIQNLEQQLDTGLKNIRARKNQLLHESINELQKKGKAIQEQNTTLTKQLKEKEKDKTIPQNTQWEQHNYVDHDTTFFLPQPHPALNIGGDYNQATTSAASGGEGADGRTSQLDLSLQPIYSHHLRCFPS

SEQ ID NO: 784 - protein, 318 aa, Oryza sativa
MTARSMLRNHPEASVLDTIRQHLLEEPRGGGGGEAAEASFGSLVADMWSDSLPFRDDDADDMVVFGAMRDAFSCGWLPDGVFAEVKPEPLLSPDSSSYDGSSCCFGFADVSEPVTPSDAASGAAEAAAAAAAATAEHGKEEEAAAAVARGKHYRGVRQRPWGKFAAEIRDPAKNGARVWLGTFDTAEDAALAYDRAAYRMRGSRALLNFPLRIGSEIAAAAAAAAAAAAGDKRPSPEPATSESSFSSSSSCTTTTTSSSTSSSGSPKRRKRGEAAAASMSMPLVPPPSQLNWPVQAWYPAAAPVEQVAITPRVEQLVI

SEQ ID NO: 785 - protein, 301 aa, Triticum aestivum
  misc_feature (200)..(200): Xaa can be any naturally occurring amino acid
  misc_feature (204)..(204): Xaa can be any naturally occurring amino acid
MSGGQELNLPPGFRFHPTDEELVTHYLCRRCAGAPIAVPIITEIDLYKFDPWQLPKMALYGEKEWYFFSPRDRKYPNGSRPNRAAGSGYWKATGADKPVGTPKPLAIKKALVFYAGKAPKGEKTNWIMHEYRLADVDRSARKKNSLRLDDWVLCRIYNKKGGMEKPGVRGTRKPGGLGGAYGGGPGAMVSSPQEQKPVMXMNAXGGGGGVQPFPDFAAYYDRPSDSMPRLHADSSCSEQVLSPEFPAGEVQSQPKISEWERSFASGGDPVNPAAGSMLEPNGGFGGDPLLQDILMYWGKPF

SEQ ID NO: 786 - protein, 273 aa, Triticum aestivum
  misc_feature (199)..(199): Xaa can be any naturally occurring amino acid
HYRTSLYKKAGWYRSGIPGISSTHASAKKRKRPSQDRGVKNVQEGSQQLATLAAKQEKDDDDKDEPKRPIGTSRKSNGKQTEDKSDAPKEDYIHIRARSGQATNSHSLAERVRREKISERMKFLQDLVPGCSKVIGKAVMLDEIINYVQSLQRQVEFLSMKLSAVNPALDFNIERILSKDLFQSQGTASSTFGFLPDIXHQFLHPPKHSQAALHSIVNPADAFGRVTNAPVGCTFKEATHQVPHSFDGEVPHVIGMPFTLFNDQGIHMGNLEP

SEQ ID NO: 787 - protein, 556 aa, Arabidopsis thaliana
  misc_feature (222)..(222): Xaa can be any naturally occurring amino acid
  misc_feature (252)..(252): Xaa can be any naturally occurring amino acid
  misc_feature (313)..(313): Xaa can be any naturally occurring amino acid
  misc_feature (396)..(396): Xaa can be any naturally occurring amino acid
  misc_feature (431)..(431): Xaa can be any naturally occurring amino acid
MKRDHHHHHHQDKKTMMMNEEDDGNGMDELLAVLGYEVRSSEMADVAQKLEQLEVMMSNVQEDDLSQLATETVHYDPAELYTWLDSMLTDLDPPSSNAEYDLEAIPGDAILNQFAIDSASSSNQGGGGDTYTTNERLRCSSGVVETTTATAESTRHVVLVDSQENGVRLVHALLACAEAVQRENLTVAEALVKQIGFLAVSQIGAMRKVATYFAEALARRIXYRLSPSQSPIDHSLSDTLHMHFYEHCPYLXFSHFTSNSSLLAAFLRGRAKEVFIVKLIFFLWSSKGFSMGRRGFMPGFLRVLGTGGVLPVXFRVNGKLFPAAPDNFRLFYRKWGFKLVSISGGDFTLRLNYRGFVVNILADLDVSMLEFSPSEMESVAVNSVLEFHKFLGRLGXMDKVLGVVNQIKPEIFTVVEQESNHNSPIFLDGFXESLHYYSTLFDSLEGVPSGQDKVMSEVYLGKQICNVVACDGPDRVERHETLSQGRNRFGFVGFGAAHIGLNGFKQGSMLLVLFNGGEGFWVEESDGFFMLGWDTRPFIATWGWKFSTNLDGGSMN

SEQ ID NO: 788 - protein, 243 aa, Arabidopsis thaliana
MYGQCNIESDYALLESITRHLLGGGGENELRLNESTPSSCFTESWGGLPLKENDSEDMLVYGLLKDAFHFDTSSSDLSCLFDFPAVKVEPTENFTAMEEKPKKAIPVTETAVKAKHYRGVRQRPWGKFAAEIRDPAKNGARVWLGTFETAEDAALAYDIAAFRMRGSRALLNFPLRVNSGEPDPVRITSKRSSSSSSSSSSSTSSSENGKLKRRRKAENLTSEVVQVKCEVGDETRVDELLVS

SEQ ID NO: 789 - protein, 431 aa, Arabidopsis thaliana
MAFHHNHLSQDLSFNHFTDQHQPPPPQPPPPPPQQQQHFQEAPPPNWLNTALLRSSDNNNNFLNLHTATANTTTASSSDSPSSAAAAAAANQWLSRSSSFLQRNNNNNASIVGDGIDDVTGGADTMIQGEMKTGGGENKNDGGGATAADGVVSWQNARHKAEILSHPLYEQLLSAHVACLRIATPVDQLPRIDAQLAQSQHVVAKYSALGAAAQGLVGDDKELDQFMTHYVLLLCSFKEQLQQHVRVHAMEAVMACWEIEQSLQSLTGVSPGEGMGATMSDDEDEQVESDANMFDGGLDVLGFGPLIPTESERSLMERVRQELKHELKQGYKEKIVDIREEILRKRRAGKLPGDTTSVLKAWWQSHSKWPYPTEEDKARLVQETGLQLKQINNWFINQRKRNWHSNPSSSTVLKNKRKSNAGDNSGRERFA

SEQ ID NO: 790 - protein, 272 aa, Oryza sativa
MDDGDLDFSNPDTFLCPAVGGADPDGSCSMDSYFDDILKDTEHHACTHTHTCNPPVHDLSHTHTCVHVHTKIVSAPSDTPSDAAETAESPTENNASKKRPSGNRAAVRKYREKKKAHTASLEEEVVHLRALNQQLMKKLQNHATLEAEVSRLRCLLVDIRGRIEGEIGAFPYQRPVKNIDLVSSVDQGSYLGGAQVMNSCDFRCADQMYCSPGMQVRTMGEDGAVSGQVLGQGACDIASIQCQGAKSGSAKLPVCGAMGTMPVGCMPNSEKK

SEQ ID NO: 791 - protein, 120 aa, Triticum aestivum
IRHEQSHSALEAEVARLRCLLVDIRGRIEGEIGTFPYQRTVKGNDFVDQGSFLGGAQVMNSCDFRCNDQLYCNPGMQQARTMEDDGVMSGQVLGQGAGDSMGCVKPGSLNPPGCRGGQML

SEQ ID NO: 792 - protein, 152 aa, Triticum aestivum
QCAGPGFCAHPIPFPVMPPSIWPLVSPWPNGAWSAPWLGPAYNMSAAPPTSSSTCSDSGSPVLGKHPRDSEPQGGEKAERSLWIPKTLRIDDPDEAAKSSIWTTLGIEPGERGMFRAFQPKSGGREQMSNAARVMQANPAAQSRFASFQETT

SEQ ID NO: 793 - protein, 205 aa, Oryza sativa
MVQPKKKFRGVRQRHWGSWVSEIRHPLLKRRVWLGTFETAEEAARAYDEAAVLMSGRNAKTNFPVQRNSTGDLATAADRDARSNGGSRNSSAGNLSQILSAKLRKCCKAPSPSLTCLRLDPEKSHIGVWQKRAGARADSNWVMTVELNKEVEPTEPAAQPTSTATASQVTMDDEEKIALQMIEELLSRSSPASPSHGEGEGSFVI

SEQ ID NO: 794 - protein, 563 aa, Oryza sativa
MIHPLAVSLSTASHCCSLPSLHLQPPPQPYTSTIEEVAFSSGYFFGGDVSICKSEQDYLRSSAVADVLSCAYAVLLSSIGSGRSWSRGISIVRDVRDSFGSLSRRSFEVRISGLPGLSGHHRGKSLGSLSELRDRPVVVDQSRWVGLPPELLRDVMKRLEEGESNWPSRKDVVACAAVCRTWREICKDIVQSPEICGKLTFPVSLKQPGPRDGLIQCFIKRDKSKLTYYLYLCLSPAVLSENGKFLLAAKRNRRATSTEYIISVDSKNISRSSNGYVGKMRSNFLGTKFVVYDTQPPYNAGSLMSCQHGSRRISSRRVSPKLPTGSYPIAHVKYELNVLGTRGPRRMQCTMHSIPASAVDPEGVVPGQPEQLLPGPFEESFRSTNTSSRFSFMDRSLDFSSSRFSEISGSANQQGEDDIPEAKERPLVLRNKVPRWHEQLQCWCLNFRGRVTVASVKNFQLIAAASSESSQLEQQQQQQQQNHASSSSSASDHGKVILQFGKVGKDMFTMDYRCEQRMATHLKCSCLLLLHLYHDHSCYMREATLLQPAYVLEGATWKGGNIS

SEQ ID NO: 795 - protein, 410 aa, Oryza sativa (japonica cultivar-group)
MPPPLSFLHLAANPTPLHASPLRRARLRHRLSLRTDHPSRRAVASASASAGENPSTPGGPIADVEMVRGKDGVWTARPPTVVVLWDLDNKPPRGPPFPAATALRDAASLLGRVVSVSAFANRHAFSHVPAWVADERRERRAMDRAERAGAASPPVPYSCAVCGRRFPTRPDLTRHFRQLHQRERNKKLSRLRSLKGKKRQKFRERFISGNTKYDDAARELLTPKVGYGLAAELRRAGVHVRTVSDKPQAADHALKRQVKHSVACGVDWLVLVSDDSDFTDTVRKARAADLRTVVVGDGCRALGSVADIWLPWDRVENGEVDEDMLRNGTHMGFRDEEEDEQDDDEFIVDWDTSDLDGVVDDIVATRTKLFGATTMSAFADEEIMDGILGVGINGGDMLWSSDDEDEDGYF

SEQ ID NO: 796 - protein, 475 aa, Zea mays
MAMGGAFPFQWPEGPADPVLDDVTLPPLPTAAPDAGVAAYYADAADVHAMHMALPDFAAALAAMRREEEEAAGIRLVHLLMSCAGAVEAADHAGASAHLADAHAALAAVSPTSGIGRVAVHFTAALSRRLFPPTPSPSPSPPPPAPHAADADRAFLYHRFYEAGPYLKFAHFTANQAILEAVQGCKHVHIIDFSIMQGLQWPALIQALALRPGGPPSLRLTGIGPPSPPGRDDLRDVGVRLADLARSVRVHFSFRGVAANRLDEVRPWMLQVSQGEAVAVNSVLQLHRLLADAPSSGDARAPIDAVLECVASVRPRVFTVVEQEADHNKPGFLDRFTEALFYYSAVFDSLDAASGGAGDAAAEAYLEREICDIVCGEGAGRRERHEPLWRWRDRLGRTGLAAVPLGANALRQARMLVGLFSGEGHCVEEAEGCLTLGWHGRPLFSASAWRAEENNQSDSRSRSSGSEESNISCSS

SEQ ID NO: 797 - protein, 297 aa, Glycine max
MAGDIGRALPPPDSEEFSTLFNQLLHNSPPLGMDPNHSPSDFTPHNTTININSNNNNNTVPSSPSNFNFSDPHHYIPASDATTFKQHNINHNNNHTPDFTSSHVEKSVEASKPVPPPRSSSKRSRAAEFHNLSEKRRRSRINEKMKALQNLIPNSNKTDKASMLDEAIEYLKQLQLQVQMLMMRNGLSLHPMSLPGGLRPMIMPQTGLNLDGSNGFQNSTCAIASSSNDESLVRHAFSFPKQCSISNKSIGVPSVKNIATSDTSSTFHPSIKDALYGNMPQPFMDTTKIGKPSPDVS

SEQ ID NO: 798 - protein, 117 aa, Triticum aestivum
  misc_feature (7)..(7): Xaa can be any naturally occurring amino acid
  misc_feature (24)..(24): Xaa can be any naturally occurring amino acid
GLAPAPXRDPDPCPRCGSRDTKFXYYNNYNTSQPRHFCKSCRRYWTKGGSLRNVPVGGGTRKSGSSSSASATATPTSTGAPPKSPRSSKNSKRRRVRPDPVSGPAPTLVPGNATDTD

SEQ ID NO: 799 - protein, 673 aa, Gossypium barbadense
MAFPASDIPSAEQQADDPLYRELWHACAGPLVTLPRVGERVYYFPQGHMEQLEASMHQGLEHQMPSFDLPSKILCKVASVQRKAEPDTDEVYAQITLVPEVDQSEVMSPDDPLQEPERCIVHSFCKTLTASDTSTHGGFSVLRRHADDCLPPLDMTQQPPWQELIATDLHGNEWHFRHIFRGQPRRHLLTTGWSVFVSSKKLVAGDAFIFLRGANGDLRVGVRRLMRQQANMPSSVISSHSMHLGVLATASYALSTRSMFSIFYKPRTSLSEFIVSVNKYLEARSHKLSVGMRFKMRFEGEEVPERRFSGTIVGVEADKSSGWADSEWRSLKVQWDEPSSIIRPDRVSPWELEPLVATSNSSISQPAQRNKRARPPVLPSPSSDLSSLGIWKSPVESPFSYCDAQRGQPSPKLSSTAKPNSVGFSGNSSLAAVSSSSKYWPNRVENVTESVAPVVNKESSERKQGTGNGCRLFGIQLIDNINMEENSPLATISGTGVNDQPLHSLDANSDQQSDPSNLNQSDLPSISCEPEKCLRSPQESQSKQIRSCTKVHMQGMAVGRAVDLTRFDCYEDLLKKLEYMFDIKGQLCGSTKNWQVVYTDDEDDMMMVGDDPWNEFCSMVRKIFIYTSEEVRKLSPKIKLPVNDDDDDSKATKAGVDTVINPEDRSSIVGQGC

SEQ ID NO: 800 - protein, 1099 aa, Gossypium arboreum
MGKSELTDGCLSDDAGEAPERRHINPELWQACAGPLVNLPAAGTHVVYFPQGHSEQVAASMKRDVDAQIPNYPNLPSKLLCLLHNVTLHADPETDEVYAQMTLQPVSSFDKEALLRSDLSLKSNKPQPEFFCKTLTASDTSTHGGFSVPRRAAEKIFPPLDFSMQTPAQELVARDLHENVWKFRHIYRGKPKRHLLTTGWSLFVSGKRLFAGDSVLFIRDETQQLLLGIRRANRQPANLSSSVLSSDSMHIGILAAAAHAAANNSPFTVFYNPRASLSEFVIPLAKYYKAVYNHQISPGMRFRMMFETEESGTRRYMGTITGISDIDPVRWKNSQWRNLQVGWDESTAGERRNRVSIWEIEPVTAPFFICPSPLFRSKRPRQPGMLADEYSDLDNLFKRPMPWLGDDICLKDSDAHPGLSLVQWMNMQQNPLLANSMQPNFMQSLAGSTMQNFDGADLSHQMGLSAPQMPQPNNLQFNAHRLPQKVQQLDQVPKLPSTMNSLGSIIQPQQLNDMTQQSRQNLVAQTLPSSQVLQPQALVRSNNILHQQQTSNPTHQLPLSLPQNLQQQQQYLVGPNHPQNLMHSQLPDPLNQHLQVPDNQVQFQLMQKLQQQQQLLLAQQSALQQPGLLAQPQDQQRQLLDASQSFSSSVTASQVLEMPQNIPTLLPQSNVAPQQMPKNNSQANVWFSQPPLQSKVQQQQTGMLPEVPGLVGPFQTTATNQFSTAVSSVMTSAAVAAPSVITDDNPSCSTSPSTNCPSVLQPMIDSRVHRSAGLGDDISQSAATVLNPNALETMSTKANMVKEQQQKSVKPLLNISKSQNQGSFAPQNCINGATAHADCLDTSSSTTSVCLSQSDAHLHQNTLSYNPQTMLLRDTSQEGEVRAYPRNNVSYGNNMDSQIEMPMNSDTLSAKGMMGLGKDFSNHLSSGGILASYENPKDAQQELSSSMVSQPYRVPDMAFNSIDPTINHSSFINRNAWTPPSQFQRLRTYTKVYKRGAVGRSIDITRYSGYDELKQDLARRFGIEGQLEDRGRVGWKLVYVDHENDVLLVGDDPWEEFINCVRCIKILSPQEVQQMSMDGEFGNSVLPNQDCSSSGNGNA

SEQ ID NO: 801 - protein, 593 aa, Oryza sativa (japonica cultivar-group)
MMGAAVTMVDRRMAFAAEADVDSKAAFGFFGGECFVGEGDLVNPAPPPPQQQQVHEGGFAAEDESDGDDDDDDDDDVDDIEELERRMWRDRVRHKRLKELQQSRAGRESRAGDAGGGGRQQRQSQEQARRKKMSRAQDGILKYMLKMMEVCNAQGFVYGIIPEKGKPVSGASDNLRSWWKEKVRFDRNGPAAIAKYQADNAVPGCDGDAGGAAPAGPHSLHELQDTTLGSLLSALMQHCDPPQRRFPLEKGVPPPWWPEGSEAWWPEAGVPKELGPPPYKKPHDLKKAWKVAVLTAVIKHMSPDVDKVRRLVRQSKCLQDKMTAKEIVTWLAVLKQEEDLYLKLHPGALPPPLSAASFNASVSGEYDVEGVDGDEAGNNNLQKAQNDATAFMDLTTTMDAALSNNKFLIMPLMKEEAIDVDFIQKRSEPELMLSSDSHARVYTCGNVQCPHSNYALGFLDRNERNAHQYACKHNAAAAAAESKPPPPHIFEPLGSFDFDLPVDGQRCLAGLMTMYDNDVAAATQMHHHHHQQQQANFFIRDDAPFGGDVAATAAAAPEFRFSSNFNVTGGGAVDYGGAMQQPPAKYAGSNWFY

SEQ ID NO: 802 - protein, 313 aa, Triticum aestivum
SAQLQPTEYRPNPTPGDNRASTARMLLNPASEALVLDSIRQHLMEDTAAPAPEARRQRPAYCRSASFGSLVADQWSESLPFRADDSDDMVVYGALRDAFSCGWLPDGSFAAVKPEPLLPSPDSCYVGFLEPETPPATSPGESEEEAAAAFMGEAAAAAARGKHYRGVRQRPWGKFAAEIRDPAKNGARVWLGTYDTAEDAAVAYDRAAYRMRGSRALLNFPLRIGSEIAAAHAAAAAAGDKRPSPEPATSDSSSSSSSSGSPKRRKRGEAAAASMAMALVPPPSQLSRPAQAWYPAAPVEQVAMAPRAQQLVS

SEQ ID NO: 803 - protein, 276 aa, Oryza sativa (japonica cultivar-group)
MPNLTSIDPLPVPADGGKRRASDDSELASGQQKRRRRKVQERKKGVPWTEEEHKKFLEGLRQLGKGDWRGISKNFVTSRTATQVASHAQKYFLRQTNPGKKKRRASLFDVVAECSDDQLPSPQSVGTKPPTQDIIHTDRGDVPILSYPVARGFRGDSVQVDELTEYVKRLKAAEDMSLSMISGLEMASSSISSLELSIAPSHLRIDGAIKGLGSKPNFPPKEFGSASATVFCPPCCCLLLLFFFFFFAGVVCCCCCCSCHANFVFGSCGVSFTSFI

SEQ ID NO: 804 - protein, 170 aa, Brassica napus
DLDDSSTVSGDASVSSTGNQNPPPQSAVKKKRNLPGMPDPDSEVIALSPKTLMATNRFVCEICSKGFQRDQNLQLHRRGHNLPWKLRQRSSKEVRKKVYVCPVSGCVHHDPSRALGDLTGIKKHFCRKHGEKKFKCEKCSKSYAVQSDWKAHSKICGSKEYRCDCGTLFS

SEQ ID NO: 805 - protein, 117 aa, Glycine max
MADSDNDSGGAHNAGKGSEMSPREQDRFLPIANVSRIMKKALPANAKISKDAKETVQECVSEFISFITREASDKCQREKRKTINGDDLLWAMTTLGFEDYVEPLKGYLQRFREMEGE

SEQ ID NO: 806 - protein, 340 aa, Boea crassifolia
MGRAPCCDKTGLLMKKGPWSQEEDQKLLDYIQKYGYGNWRTLPTNAGLQRCGKSCRLRWTNYLRPDIKRGRFSFEEEETIIRLHSILGNKWSLIAARLPGRTDNEIKNYWNTNIRKRLLRMGIDPVTHSPRLQLLDLSTILNSSLCNNSPTQMNFSRLQPRFNPELLRFAASLFSSNCQSQDFPMQNQITSNNQIPPPFMQTSVQDVAVLPDLCADTNLGTSFSVHDEVQEFQQNPAGYGMPSALTGEYVPVLNDGYYGSGDQPFVDPTPSSVTSNFQSYCSNSLGFQSIFSTPPSSPTPLNSNSTYVNSCSSTEDETESYYNSMWKFEIPDNLRINDFM

SEQ ID NO: 807 - protein, 362 aa, Oryza sativa (japonica cultivar-group)
MVTSKEFARDQAAMDQKIKSDVGEVVLAGDEEEDGDVVLPGFRFHPTDEELVTFYLRRKVARKSLSIEIIKEMDIYKHDPWDLPNASTVGGEKEWYFFCLRGRKYRNSIRPNRVTGSGFWKATGIDRPIYSAAVNSNSGESIGLKKSLVYYRGSAGKGTKTDWMMHEFRLPPAIAAADASPCMQEAEVWTICRIFKRSITYRKQQQQQAWRPPATVTVKAPPPGDSSSNTGSFESDGGGDEFMNCGLTPAISQQQQHGGRHQMMSTMSCNGGYFFNDGIHHSHSHHKLHSQWGSLQMAPPEPKPEPEQKPLSSPAMTIAFHQNDHGFPAAAADFYKDGYLEEIARMMEVADPSPTGFYDCRY

SEQ ID NO: 808 - protein, 529 aa, Arabidopsis thaliana
MQTSQKHHSAAGLHMLYPQVYCSPQFQAKDNKGFSDIPSKENFFTLESSTASGSLPSYDSPSVSITSGQSPFSPQGSQSCISDLHHSPDNVYGSPLSGVSSLAYDEAGVKSKIRELEVSLLSGDTKVEEFSGFSPAAGKSWNWDELLALTPQLDLKEVLVEAARAVADGDFATAYGFLDVLEQMVSVSGSPIQRLGTYMAEGLRARLEGSGSNIYKSLKCNEPTGRELMSYMSVLYEICPYWKFAYTTANVEILEAIAGETRVHIIDFQIAQGSQYMFLIQELAKRPGGPPLLRVTGVDDSQSTYARGGGLSLVGERLATLAQSCGVPFEFHDAIMSGCKVQREHLGLEPGFAVVVNFPYVLHHMPDESVSVENHRDRLLHLIKSLSPKLVTLVEQESNTNTSPFLSRFVETLDYYTAMFESIDAARPRDDKQRISAEQHCVARDIVNMIACEESERVERHEVLGKWRVRMMMAGFTGWPVSTSAAFAASEMLKAYDKNYKLGGHEGALYLFWKRRPMATCSVWKPNPN

SEQ ID NO: 809 - protein, 343 aa, Brassica napus
  misc_feature (210)..(210): Xaa can be any naturally occurring amino acid
STHASAEFSSHFFSSVDHLDGPNHPKKPLTIKEAAKPEAKAMAPPKFRPPVVSVGPSHCGSNQSTNDHQVTHPPVSMSDRSKNVEERLDTSSGGSSGCSKETESGRSVSISRKRKHAMDTDQESMSQSDVRLMPTDDQTMGNKSSQRSGSTRRSRAAEVHNLSERRRRDRINERMKALQELIPHCSKTDKASILDEAIDYLKTLQMQLQXVMWMGSGMAAAAAAAATPMMFPGVQSSQYINQMAMQSQMQMPQFPVMNRPAAQNHPGLVCQNPAVQFQMQAQNQMLSEQLARYMGGFPPMPATTQTQTVQQPMDMMRFGSQVGQQSQLSTPVTTDSLRMGKTG

SEQ ID NO: 810 - protein, 386 aa, Triticum aestivum
  misc_feature (180)..(180): Xaa can be any naturally occurring amino acid
  misc_feature (249)..(249): Xaa can be any naturally occurring amino acid
  misc_feature (350)..(350): Xaa can be any naturally occurring amino acid
  misc_feature (361)..(361): Xaa can be any naturally occurring amino acid
MSQFVPDWGNMGDISRPLGEDDDLMELLWCNGNVVMQSQGHRKLPPRPEKVPAPPVVQEDEAGLWFPFALADSLDKDIFQDLFCEEPPGAAGVDGAPRLRSMSLADCGDNAGGVLSDLVQARAGKAAMEEGASSTLSAMGASFCGSNQVQVQGAVSDHGRAGHATAYGGGGAGSALPSAXWGAEMQTPEAGATRPPWPPRRAGPTTASASPPPLAPSRRARATGAASASGGWTRRTRRAPARTPSRSRXALERKPPQKLTTARRSRAAEVHNLSERRRRDRINEKMRALQELIPHCNKTDKASMLDEAIEYLKTLQMQVQMMWMGGGMAPPAVMFPGMQMHQYLPQMGPXSMARMPFMAPXQQGHGVSLPEQYAHFLGVNPHTGAG

SEQ ID NO: 811 - protein, 238 aa, Pisum sativum
KNKINRQVTFSKRRNGLLKKAYELSVLCDAEVALIIFSSRGKLYEFGSLGTAKTLERYQRCSFNPQQDDHQIDGETQSWYQEVSKLKAKYESLQRTLRGSCLERLGPLNIKELQYLEKQLEGALAQARQRKTQIMIEQMEELRKRERHLGDMNKQLRLKLEGEGFNLKAMESLWSSNSVAGNSNFTFQQPSYQPYVYDYGYPAEPFLQIGYQQYFQAEASNASKNMACETNFMQGFFL

SEQ ID NO: 812 - protein, 826 aa, Oryza sativa (japonica cultivar-group)
MAPPPPPQGSSTGDPLYDELWHACAGPLVTVPRVGDLVFYFPQGHIEQVEASMNQVADSQMRLYDLPSKLLCRVLNVELKAEQDTDEVYAQVMLMPEPEQNEMAVEKTTPTSGPVQARPPVRSFCKTLTASDTSTHGGFSVLRRHADECLPPLDMTQSPPTQELVAKDLHSMDWRFRHIFRGQPRRHLLQSGWSVFVSSKRLVAGDAFIFLRGENGELRVGVRRAMRQLSNVPSSVISSQSMHLGVLATAWHAINTKSMFTVYYKPRTSPSEFIIPYDQYMESVKNNYSVGMRFRMRFEGEEAPEQRFTGTIIGSENLDPVWPESSWRSLKVRWDEPSTIPRPDRVSPWKIEPASSPPVNPLPLSRVKRPRPNAPPASPESPILTKEAATKVDTDPAQAQRSQNSTVLQGQEQMTLRSNLTESNDSDVTAHKPMMWSPSPNAAKAHPLTFQQRPPMDNWMQLGRRETDFKDVRSGSQSFGDSPGFFMQNFDEAPNRLTSFKNQFQDQGSARHFSDPYYYVSPQPSLTVESSTQMHTDSKELHFWNGQSTVYGNSRDRPQNFRFEQNSSSWLNQSFARPEQPRVIRPHASIAPVELEKTEGSGFKIFGFKVDTTNAPNNHLSSPMAATHEPMLQTPSSLNQLQPVQTDCIPEVSVSTAGTATENEKSGQQAQQSSKDVQSKTQVASTRSCTKVHKQGVALGRSVDLSKFSNYDELKAELDKMFEFDGELVSSNKNWQIVYTDNEGDMMLVGDDPWEEFCSIVRKIYIYTKEEVQKMNSKSNAPRKDDSSENEKGSVKRDDTRGRSHGVLRERCHSAGPSQVNPLMCW

SEQ ID NO: 813 - protein, 480 aa, Glycine max
  misc_feature (66)..(66): Xaa can be any naturally occurring amino acid
MIIHKTPNMGKDDEGFDVPKTMSNLTSASGEARASSGNRTEIGTDYSQQYFTPPPTQTQPPLKKKXNLPGNLDPEAEVVALSPKTLLATNRFICEICNKGFQRDQNLQLHRRGHNLPWKLKQRSSKDIIRKKVYVCPEPSCVHHEPSRALGDLTGIKKHFCRKHGEKKWKCDKCSKKYAVQSDWKAHSKTCGTREYRCDCGTLFSRRDSFITHRAFCDALAEESARSVTGIVANSTTQPTEAAGVVISSSSLHQDMIHASNNNFPLKKEQQGCIPHWLGQPSPSSASSSFLFSHQDHHLHENPNPRGGPTLLPPPYHQTAPHMSATALLQKAAQMGATMSKTGSMIRTHQQQAHVSANAALNLSSRDHQMNPTPHDLLPFGNNKAVDNGVGVSPSLLHHVINSFSSSPFEGTFEDTFGGGDAMTADEGGGGGAGGNNNEGLTRDFLGLRHLSHTDILNIAGVGNCMNSSQHNQTRNPWQG

SEQ ID NO: 814 - protein, 404 aa, Zea mays
MPHVLSFLHLHLPLNTAPLHSFRVHRTRHSHPHLSLRTRRASATAAAAEAENPSASADVEMVRGRDGVWTARSPTVVVLWDLDNKPPRGPPFPAATALIGAASLLGRVVSISAFANRHAFSHLPGWVTAERRARRALDRSERAGVVVPSVPYSCSVCGRRFPTRPDLTRHFRQLHERERNKKLSRLRSLKGKKRQKFRERFITGNTKYEDAARELLTPKVGYGLASELRRAGVHVRTVPDKPQAADHALKRQVKHSVACGVDWLVLVSDDSDFTDTVRNARAADLRTVVVGDGCRALGKVADIWLPWDRVENGEVDEEMLRSCTFSEYREDQGTERDGQFIGDWDAGDFDDVVDDIVGTRTSLLGATTMSAFADEDIADGIFGVELTGDNMFWSSDDEEEDDYL

SEQ ID NO: 815 - protein, 129 aa, Erwinia carotovora subsp. atroseptica SCRI1043
MADKELRFLVVDDFSTMRRIVRNLLKELGFNNVEEAEDGSDALNKLRSGAFDFVISDWNMPNMDGLELLQTIRADGALSKLPVLMVTAEAKKENIIAAAQAGASGYVVKPFTAATLEEKLSKIFEKLGM

SEQ ID NO: 816 - protein, 217 aa, Pisum sativum
MDKKPCNSSQDPEVRKGPWTMEEDLILINYIANHGEGVWNSLAKAAGLKRTGKSCRLRWLNYLRPDVRRGNITPEEQLLIMELHSKWGNRWSKIAKHLPGRTDNEIKNFWRTRIQKHIKQVDNPNQQNFQQKMSLEINDHHHHHPHQPSSSQVSNLVEPMETYSPTSYQGTLEPFPTQFPTINNDHHQNSNCCANDNNNNNYWSMEDIWSMQLLNGD

SEQ ID NO: 817 - protein, 299 aa, Glycine max
MEVAAAKALKPSLRTEFIFPQAIYDEILCFNANNVVAGEDFSMDDLLDFSNGEFQVGKDFDDYEEEEDEEKNSTSGSLQSQDRAEDDNNSNSTAGGGGHDYVFAGELSVPADDVADLEWVSHFVDDSLPELSILYPIHCSKKTRVWAEPESRLSPAQTVSKVPRKSRTEKPRKPNTRVWSSFTVFAGSVGFGELVTKKQKKKVEAQSGGAQSLRRCSHCQVQKTPQWRIGPLGPKTLCNACGVRFKSGRLFPEYRPACSPTFCGHIHSNNHRRVLEMRWKKQIAESVTGSDRKQLIPNY

SEQ ID NO: 818 - protein, 466 aa, Zea mays
  misc_feature (387)..(387): Xaa can be any naturally occurring amino acid
HTHTHTQKSIDGRTALLAFCFWYWGFVILTHGVYACFSGRPVKDDGRMDALKCNNSVLPEETAADAAGAFVEKDGFSVEDLLDLEEFAEPDKDVAEREDDDAPPAAAAAAERSKADSQPSSVVKYDLPPLLPPPPEMVDLPVSCLGAPSLDRFYSCGKASSYPQGYLRKLRLIYAALAFPQSHDVEELEWVSRIMDDSLSELQPQAQPKPAAAVVASSAARPPLAQQRRPFAHDGAYRAVASAPPQAGPQRTPTICALSTEAMIPVKAKRSKRSRGPGWSRPGASFLPDSASSSSTTTTSSCSSSGCSISPFLRLDSSPFGGLELGEGLFSYGHILPRPPSKKSKHGGKGSKHRPKKRGRKPKHLPPPHPSAAGVRVAARAQRPALXHCGVQKTPQWRAGPEGAKTLCNACGVRYKSGRLLPEYRPACSPTFVSSIHSNSHRKVLEMRRKKEGGMVATAAPAVASF

SEQ ID NO: 819 - protein, 394 aa, Zea mays
MASFVVHHHGSPLDREGKVKMSALALRSSLRPCEAAEEVGAGQAWCRGADMGVAAFVDEFSVEDLLDLEDLCEVDKDCAELGDTVPAAESVQEGDKVSSDSHGSSVLSYELMTLPVPHPMIDLPLPAHDAEELEWVSRIMDDSLAELPPPPKLPAAPLGAARRPLEGAVAGPMRSPTTTICALSTEALVPVTRAKRSKRSRGSVWSLSGGAPLSESTSSSSTATTSSCSSSASFSPLLLLPADPSLVLSSHLLDETPRPKKKSKHGKHGKSGKPKKRGRKPKHHPKPPQFSGGAAYAPAQGDRRCSHCGVQKTPQWRAGPEGAKTLCNACGVRYKSGRLLPEYRPACSPTFVSSIHSNSHRKVLEMRRKKDGDLGQLPLPVPAALLLGPAVESF

SEQ ID NO: 820 - protein, 183 aa, Avena sativa
YRVSIGLPGNGGWCSGWGRGDDGGAANARASVQGRGETWVRRRSGRQGCGGGGGRREEEGAGPAAKAQVVGWPPIRSYRKNTMATSLSAPRSKDEVEAKQAPVAGCLYVKVSMDGAPYLRKVDLKMYKNYKDLSLELEKKFSCFTVGHGESNGKSGRDGLSDCRLMDPKSGAELVLTYEDKDG

SEQ ID NO: 821 - protein, 100 aa, Brassica napus
  misc_feature (13)..(13): Xaa can be any naturally occurring amino acid
  misc_feature (19)..(19): Xaa can be any naturally occurring amino acid
  misc_feature (26)..(26): Xaa can be any naturally occurring amino acid
  misc_feature (30)..(30): Xaa can be any naturally occurring amino acid
  misc_feature (90)..(90): Xaa can be any naturally occurring amino acid
GFKEKIVDIREEXLRKRRXGKLPGDXTSVXKAWWQSHSKWPYPTEEDKARLVQETGLQLKQINNWFINQRKRNWHSNPSSSTVLKNKRKXGDNSGRERFT

SEQ ID NO: 822 - protein, 329 aa, Oryza sativa (japonica cultivar-group)
MYEPKPFSSIVLAHNDPVSHNQQIERINNNVVSNSGGNSSNSNFAARQRLRWTDDLHDRFVDAVTQLGGPDRATPKGILRIMGVQGLTIYHVKSHLQKYRLAKYIPDPTADGAKSDKKDLGDLLADIESSSGMEIGEALKLQMEVQKRLHEQLEVQRQLQLRIEAQGRYLQKIIEEQQRLSGVLGESGKLGALGPAPGEPYQDSNKTDPSTPVPTSESPIRDKAGSGLFKTISSHDDCREPLTPDSSCRAGSPLESPPRASKRIRVSSDIDHRGNNEFPPPLKVPEPSSGSDFRQESSVLLSSSAVHFDSLESLDADENVFTNGSGSDD

SEQ ID NO: 823 - protein, 247 aa, Gossypium hirsutum
MEQGRYWMWTKRRHGLTSHHHHHHHHHHHVESSTKEGAYYDSWEEQAFAEDACGTLGGCIWPPRSYSCSFCGREFRSAQALGGHMNVHRRDRARLKQSPPSPSPPHHEHHHHQNNIQDPFLPLGFPCQPDEVCNFLYNPNPNSNHGTTKQDCPGPPLFSSPKPWSNLTADRYGGDKSPRTLVVRETHKEDITVGCKRKRTDDHTPTMTLLPFFLEPISIQKHHHHHPPADEDNNIDLELRLGLNAQS

SEQ ID NO: 824 - protein, 120 aa, Avena sativa
GSVVGWPPVRSYRRNAMTVQSVKIKKEEETEKQQPASAVAAAAAAATAGGNGSAFVKVSMDGAPYLRKVDLKMYNTYKDLSIALQKMFSTFTATGNEGKMVEAVNGSDVVTTYEDKDGDW

SEQ ID NO: 825 - protein, 180 aa, Triticum aestivum
MMGGGLLMDQGMAFSGVHNFVDLLQQNGADKNLGFGSLMPQTSSGDQCVMGEGDLVDPPTDNFPDAGEDDSDDDVDDIEELERRMWRDRMKLKRLKELQQSRGKEQAAAGGGVGDGLKPRQSQEQARRKKMSRAQDGILKYMLKMMEVCRAQGFVYGIIPEKGKPVSGASDNLRAWWKEK

SEQ ID NO: 826 - protein, 255 aa, Petunia integrifolia
MSTSNASTSGVRKGAWTEEEDLLLRECIEKYGEGKWHLVPVRAGLNRCRKSCRLRWLNYLRPHIKGGDFSLDEVDLILRLHKLLGNRWSLIAGRLPGRTANDVKNYWNTHLRKKLIAPHDQKQESKNKAMKITENSIIKPRPRTFSRPAMNHVSCWNGKSCNKNTIDKNEGDTEIIKFGDEKQKPEESIVDGLQWWANLLANNIEIEELVSYNSPTLLHEETAPSVNAESSLTQEGGSGLSDFSVDIDDIWDLLS

SEQ ID NO: 827 - protein, 255 aa, Petunia integrifolia
MSTSNASTSGVRKGAWTEEEDLLLRECIEKYGEGKWHLVPVRAGLNRCRKSCRLRWLNYLRPHIKRGDFSLDEVDLILRLHKLLGNRWSLVAGRLPGRTANDVKNYWNTHLRKKLIAPHDQKQESKNKAMKITENNIIKPRPQTFSRPAMNHVSCWNGKSCSKNTIDKNEGDTEIIKFSDEKQKPEESIDDGLQWWANLLANNIEIEELVSCNSPTLLHEETAPSVNAESSLTQGGGSGLSDFSVDIDDIWDLVS

SEQ ID NO: 828 - protein, 836 aa, Oryza sativa
MATAEVGGGGGGGGGGGEDALFTELWSACAGPLVTVPRVGEKVFYFPQGHIEQVEASTNQVGEQRMQLYNLPWKILCEVMNVELKAEPDTDEVYAQLTLLPESKQQEDNGSTEEEVPSAPAAGHVRPRVHSFCKTLTASDTSTHGGFSVLRRHADECLPPLDMSRQPPTQELVAKDLHGVEWRFRHIFRGQPRRHLLQSGWSVFVSAKRLVAGDAFIFLRGENGELRVGVRRAMRQQTNVPSSVISSHSMHLGVLATAWHAVNTGTMFTVYYKPRTSPAEFVVPYDRYMESLKRNYSIGMRFKMRFESEEAPEQRFTGTIVGMGDSDPAGWPESKWRSLKVRWDEASSIPRPERVSPWQIEPAVSPPPVNPLPVPRTKRLRPNATALPADSSAIAKEAATKVVVESEPNGTQRTFQTQENATPKSGFGNSSELESAQKSIMRPSGFDREKNNTPIQWKLGSDGRMQMSKPESYSEMLSGFQPPKDVQIPQGFWSLPEQITAGHSNFWHTVNAQYQDQQSNHNMFPSSWSFMPPNTRLGLNKQNYSMIQEAGVLSQRPGNTKFGNGVYAALPGRGTEQYSGGWFGHMMPNSHMDDTQPRLIKPKPLVVAHGDVQKAKGASCKLFGIHLDSPAKSEPLKSPSSVVYDGTPQTPGATEWRRPDVTEVEKCSDPSKAMKPLDTPQPDSVPEKPSSQQASRNMSCKSQGVSTRSCKKVHKQGIALGRSVDLTKFNGYEELIAELDDMFDFNGELKGPKKEWMVVYTDNEGDMMLVGDDPWIEFCDMVHKIFIYTREEVQRMNPGTLNSRSEDSHANSMERGSVGREMRGCLSTSSLNSENC

SEQ ID NO: 829 - protein, 342 aa, Oryza sativa
  misc_feature (151)..(151): Xaa can be any naturally occurring amino acid
  misc_feature (171)..(171): Xaa can be any naturally occurring amino acid
MAKRAGGARKKLRRGLWSPEEDEELMNHIAKYGHGCWSSVPKLAGLERCGKSCRLRWINYLRPDLKRGAFSQEEEDLIIHLHSMLGNKWSQIAAQLPGRTDNEVKNFWNSYIKKKLRQRGIDPATHKPLAEVVAAAACARTPAVFSDAELXCPPSAPSRRRRAMMAAGTAXECGAASVGGDGSLSSLSGYSQATAEFAVDGASASALLHCGGGGPTSSGGGAPPAPTAAVIPSVSSSSTLNSMVGLSPAATTTTTTTDEQYGNTNHLPWLELGPSTTTPSSSAAAATFDHYGAALDELKWSDYVFDGYNHQLPPYNHGGIYGGGDSKDTAVHFDAHALGNWC

SEQ ID NO: 830 - protein, 772 aa, Oryza sativa (japonica cultivar-group)
MAGGGAKLQQQQAPTSPTASVSESNIVASTASADPEANDALAGLQALRFDGGGDIDDVEIQSPDIALWESIFADQIGVSGAGADFLLSMSSAAASPRRDFMACSPKRDYMVTTSSPKRDYMVTSSPKRDYMVSSPKREYMVTSPRREMATSPRRATFSNLYTSSHGGGGGGGHHLHHQSYVHGGGMEGGGGGHGAQPQYGGLAGHGKGKAQSPLHKVYINNVGGGSGGGGVKSNTPSTLSCASSYVVHGGESGLPSLPSMDPFLEEGYLGSYQLPEKAAGGVGGGGGGDINRSGASVSVVTAPASSQLLPTLSECLAMPEPAAYRGGGDEAVAAAMAVAGELPVGAFVQPEMYYGGGGEFGGEGMTPPLQHQMAADSSLHSMLGSVIQSEAEQEQDSGLQLVHLLLACADLVSKGDHPAALRHLHLLRRVASPLGDSMQRVASHFADALAARLSLLSSPTSASPSPRAAAAAAPYPFPPSPETLKVYQILYQACPYIKFAHFTANQAIFEAFHGEDRVHVVDLDILQGYQWPAFLQALAARPGGPPTLRLTGVGHPPAAVRETGRHLASLAASLRVPFEFHAAAADRLERLRPAALHRRVGEALAVNAVNRLHRVPSSHLPPLLSMIRDQAPKIITLVEQEAAHNGPYFLGRFLEALHYYSAIFDSLDATFPAESTARMKVEQCLLAPEIRNVVACEGAERVARHERLERWRRLMEGRGFEAVPLSAAAVGQSQVLLGLYGAGDGYRLTEDSGCLLLGWQDRAIIAASAWRC

SEQ ID NO: 831 - protein, 380 aa, Cucurbita maxima
MNPEVLSTDENDKLATRKTEKEQNDAPNSKEKLKKPDKILPCPRCNSMETKFCYYNNYNVNQPRHFCKACQRYWTEGGTIRNVPVGAGRRKNKNSASHYRHITISEALRAAQIDVPIEVNHLASKGNGRVLNFSVSPPVCESMVNVSHPAERKVLNGTRNEFEGAKGPCEGGETGDDCSSASSVTMSSSMKNGARRFPQEPHMQNINGFPSQIPCLPGVPWPCSWTAPIPPPALCPPGVPLSFYPATYWSCSASGSWNIPWVTPQPCPPIPGPNSPTLGKHSRDGDELQADNSEMKDPPKQKNGSVLVPKTLRIDDPNEAAKSSIWETLGIKNDSIKAVDLSNVFQSKGDLKSNVSEVLSPVLQANPAALSRSLTFHERS

SEQ ID NO: 832 - protein, 282 aa, Arabidopsis thaliana
  misc_feature (229)..(229): Xaa can be any naturally occurring amino acid
  misc_feature (238)..(238): Xaa can be any naturally occurring amino acid
  misc_feature (242)..(242): Xaa can be any naturally occurring amino acid
  misc_feature (263)..(263): Xaa can be any naturally occurring amino acid
MEAEEGHQRDRLCDYCDSSVALVYCKADSAKLCLACDKQVHVANQLFAKHFRSLLCDSCNESPSSLFCETERSVLCQNCDWQHHTASSSLHSRRPFEGFTGCPSVPKLLAIVGLDDLTLDSGLLWESPEIVSLNDLIVSGGSGTHNFRATDVPPLPKNRHATCGKYKDEMIRQLRGLSRSEPGCLKFETPDAEIDAGFQFLAPDLFSKCEMETRLKWFDQQDHEDFPYXSLLKNLSEXDEKXENIDRDSSVMVPVSGSLNRCXKTLLRLRVITSKRSMAHEI

SEQ ID NO: 833 - protein, 272 aa, Ipomoea purpurea
MVNSSARWSPRVRKGAWSEEEDDLLRKCIQKFGEGKWHLVPFRAGLNRCRKSCRLRWLNYLHPDIKRGHFSLEEADLILRLHKLLGNRWSLIAGRIPGRTANDVKNYWHSHLKKKVVSMHMASSNSSRQDNNWDDEKGKAPQIKENILFRPRPRRFFRTSLSSPALSTLTGKAKAVVYDAPPPPPPPPHQLQPQPEATSPAADLLMVFNVQQNSNSIETNLPAQTTAPSSHDGVKWWEDLLYDDSHQGLIDWTTDDDFPIDVDLLKLLDTTI

SEQ ID NO: 834 - protein, 363 aa, Prunus persica
MESTDSSTASQQQQQQQPQPPPQPNLPPGFRFHPTDEELVVHYLKKKVTSAPLPVAIIAEIELYKFDPWELPAKATFGEQEWYFFSPRDRKYPNGARPNRAATSGYWKATGTDKPVLTSGGTQKVGVKKALVFYGGKPPKGIKTNWIMHEYRLADSKTSNKPPGCDLGNKKNSLRLDDWVLCRIYKKNNSHRPMDLEREDSMEDMMGPLMPPSISHVGHHQNMNLHLPKSNTNYGPPFIENDQIIFDGIMSSTDGSASLSNGTSQLPLKRSIVPSLYRNDQEDDQTAGASSSKRVVQLHQLDSGTNNSVAANNNSTSIANLLSQLPQTPPLHQHAMLGSLGDGLFRTPYQLPGMNWFSESNLG

SEQ ID NO: 835 - protein, 480 aa, Medicago truncatula
MSNLTSASGEASANSSGNRTHEVDAKFSQQYFASSQTQTHDETPAKKRRNLPGNPDPQAEVIALSPKTLMATNRFICEICNKGFQRDQNLQLHKRGHNLPWKLKQRTSNEIRKKVYVCPEPTCVHHDPSRALGDLTGIKKHFCRKHGEKKWKCDKCSKKYAVQSDWKAHSKTCGTREYRCDCGTLFSRRDSFITHRAFCDALAEESSRTVIPQPTQPNSHHNMNNLQTQDIQGFTLKKEHQSFNMLRPEQEVQIPSWLCQSSIDLSSNYSSLDQDLHLYENPNPRNGPTSTLPSYQPSSAASPHMSATALLQKAAQMGATSSCSSQSMMSGTHQQGHVSIVDSATNNMINSNGNFSLNLSSCEDQMINNSFSSSGFHGTSFEDTFAGNILHSNQDHNINHDGDNDIPKTTTNDDDVAAGGNNAFTRDFLGLKPLSDSDILTIAGMGSCMNPSNSNHQENHSQKPWEDYLRRMVGNLPTNQ

SEQ ID NO: 836 - protein, 262 aa, Arabidopsis thaliana
  misc_feature (22)..(22): Xaa can be any naturally occurring amino acid
  misc_feature (157)..(157): Xaa can be any naturally occurring amino acid
  misc_feature (178)..(178): Xaa can be any naturally occurring amino acid
MEDGERDCANEEVFSSAEMGEXPPSNCAMDSVCDGRVMDRNAACTHTDTCDPTGPENTDTHTFVHVHTKIGPDESDEKVSTDETAEWCWKKGEKRPLGNREAVRKYREKKKAKAASVEDEVSRGRAVNEQRVKRSQNQATLDDAVSRLKCSLVDFRXRIDGEIGSFPYPKPMAAHIPXSLWHMINPCHVQCDDEVYCPPNVFGVNRHEGPSINDQRFSGCHLDPLQRMANQHSNGNGNGSFRNVNTSLSNKRKRGHRASRAV

SEQ ID NO: 837 - protein, 267 aa, Zea mays
MDDGDLDFSNPDTYLCPALGTDPPSSCSMDSYFDEILKDTEHLACTHTHTCNPPVHDLSHTHTCVHVHTKIVAASPGDAESPSENNSNGNAASKKRPSGNRAAVRKYREKKKAHTASLEEEVVHLRALNQQLMKKLQSHAALEAEAARLRCLLVDIRGRIEGEIGAFPYQRPPAVKNVDLLSSVDQESLLGSAAAQVANSCDFRCNDQMYCSPGMQGAVSGQVLGQGACDVSSIQCVGSTRSASTKLPVCGGMDAVPAACLPNVQNK

SEQ ID NO: 838 - protein, 899 aa, Arabidopsis thaliana
MANPLLYSPINPQFFQPLLPGFTNHLDIPVAFFLKYLVGTNVGKTAELRSDASEMTWKVKIDGRRLSNGWEDFTIAHDLRVGDIVVFRQEGELVFHVTALGPSCCEIQYGEDTLEEDKIGNLSFILNIISTFRMSLRILLNLSTEKLCGTENVSSKKKSLKREAESAPDNSLDSCFVATVTGSNLKRDTLYIPKEFALSNGLMNKYQIVLMNEEGESWKIDLRREAYNYGRFYMRRGWRSFCIANGKKPGDVFAFKLVKNEETPMIQLFPMTIEDLDKLQSLPRHKIRKTEAAPSSPDLSSFVATVTASNLSRDRLYLPKTFIMSNGLLKKFQMCLMNEEGESWTIDVKHEAHTGRFLTIRGWRRFCVANGKKPGDLLKFKLVHNEETPVLQLLPLNSEDLHKLNPSNDTRHGQSLKVTKKEFLGMEATENEFLGEEVYCNDSFKASEKDTLPFAEPINEDIRQGQCSQTIKQEYVSTEEKNSTSQNRFVTLTLTHSSKLNLPFEFMKRNGIKKAGKITMVDRYDAKWRTSLLMDKIGTMSLGRGSKGFCENIKINSSPLTTMLFNVSACDIRDKPMPSNNDINKIDQLERVKKVRKNSSQSEAGSSSSGNSSFVALVKASNLKEDALYLPQDCTSSNGLNKKCRKIFLTDGGDRSWEMDLKFDKNLDSFCITRGWRHFCDENGKKYLSRRFLKNNGLGEPKMVTLVGTDGTRILANLLRESTGRMSLGRGWVDFAKANRLKIGEYFTLESIWENDSPILSLYGTNTSKSDKRKRRENFPVACEKEYVSTEARNRNEPEKDKNTEEMINQASLSENRLVITLVPEDVKAGMLVFDITESRSDEKIMELRFNEKIQNYGFGENITESRFGEKISNHVFGSKIIESCFGGKIMESRFRREM

SEQ ID NO: 839 - protein, 610 aa, Lycopersicon esculentum
MMMFEEMGFCGDLDFFPAPLKEVEVSAPQSQTEPDSVVDDDYSDEEEIEVDELERRMWRDKMKLKRLKEMSKSKEGVDPAKQRQSQEQARRKKMSRAQDGILKYMLKMMEVCKAQGFVYGIIPEKGKPVSGASDNLREWWKDKVRFDRNGPAAIAKYQADHAIPGMNEGSNPVGPTPHTLQELQDTTLGSLLSALMQHCDPPQRRFPLEKGVPPPWWPTGKEDWWPQLGLQKDQGSLPYKKPHDLKKAWKVGVLTAVIKHMFPDIAKIRKLVRQSKCLQDKMTAKESATWLAIISQEEALARELYPDRCPPLSSAGVSGNFMLNDSSEYDVEGAQDEPNFDVHEQKPNHLNLLNISAERFKETMPLQQQSHPNKDELVTNLDFSLKRKQANEPTVMMDQKIYTCEFLQCPHNELRHGFQDRSSRDNHQFACLYRSSTCFGVSNFQINEVKPVVFPQQYVQPKSSALPVNQGPPSFDLSGIGVPEDGQRMINELMSIYDSDVQGSKRQNRGNIALTKEQPHQQPRVHQDNYLLSQGIMDGNIFKNTNISTTQSMLPQVDPFDQSKAFNAGSNDNFHFMFGSPFNIQSTNYNGNLPSIGYDTTPKQDAPIWY

SEQ ID NO: 840 - protein, 278 aa, Triticum aestivum
MMSGNTQQQQSAAAEEEEQELARKHAAAVATSRQWSSQTESRIVRVSRVFGGKDRRSKVKTVKGLRDRRVRLSVQTAIQLYDLQNRLGLNQPSKVVDWLLNAARHEIDKLPPLQFPPHQVDLMDHMMTSSSMPLMPHVDDKFCHFASTLARDGGVKAGADADGGGAHHNIGRFGYHRFMGLNNNSLGLVNSGMPYNFTGESWNNSSVDQSSGAGSPQVSIAAAAAAHHSAFPSLLSLAPRSHQLVYYSSEADQFPVDDLGSQSLSLSSARAFHDQTGS

SEQ ID NO: 841 - protein, 646 aa, Zea mays
MMGGGLMMDQSVVFPGVHNFVDLLQQNGDKNLGFASLMPQTSSGDQCVMGEGDLVDPPPDSFPDAVEDDSDDDVEDIEELERRMWRDRMKLKRLRELQQSRGKDPMASGGGLADGSSKPRQSQEQARRKKMSRAQDGILKYMLKMMEVCRAQGFVYGIIPEKGKPVSGASDNLRAWWKEKVRFDRNGPAAIAKYQADNAVPGAENELASGAASPHSLQELQDTTLGSLLSALMQHCDPPQRRYPLEKGVPPPWWPTGDEEWWPELGIPKDQGPPPYKKPHDLKKAWKVSVLTAVIKHMSPDIEKIRRLVRQSKCLQDKMTAKEISTWLAVVKQEEELYLKMHPGARPPASAGGIASAISFNTTSSEYDVDIVDECKGDEAGNQKTAVTDPTSFNLGAAILSDKFLMPTPMKEETADVEFIQKRNAPAPAEPELMLNNRVYTCNNVQCPHSDYSYGFLDRNARNSHQYTCKYNDPITQSAENKPLPAPPQPQAFQPAFSQANQAVNNLDFSLPMDGQRSIAELMNMYDTNFMTSKTMSSSDSVTIMERPNAMPQRIQMDEGFFGQGNGVFDDVNSMMQQQQQQAPPVVQQQQQQQFFIRDDTPFMSQMGDITSTAEFRFGSGFNMSSTAAADYPGAAQKNDGANWFY

SEQ ID NO: 842 - protein, 614 aa, Lycopersicon esculentum
MMMFEDIGFCADLDFFPAPLKEAETVAAVPPIVPEPMMDDDDSDEEIDVDELEKRMWRDKMKLKRLKEMSKGKEGVDAVKQRQSQEQARRKKMSRAQDGILKYMLKMMEVCKAQGFVYGIIPEKGKPVTGASDNLREWWKDKVRFDRNGPAAIAKYQADNAIPGKNEGANPIGPTPHTLQELQDTTLGSLLSALMQHCDPPQRRFPLEKGVSPPWWPNGQEDWWPQLGLPNDQGPPPYKKPHDLKKAWKVGVLTAVIKHISPDIAKIRKLVRQSKCLQDKMTAKESATWLAIINQEEVLARELYPDRCPPLSSGGSSGTFTMNDSSEYDVEGAIDDPIFDVQEQKPNHLSLLNVNVEMFKEKLPLLQQSQPMKGDIFANLDFTRKRKPADDLTFLMDPKTYTCECLHCPHSELRNGFPDRSSRDNHQLTCLFRNTSQFVVPNFHMEEVKPVVFPQQYAEPKRASLPVNPAPPSFDTSGLGVPADGQRVINELMSFYESNVQGNKSSMAGNSVMSKEQPLQQPSIQQNNYLQSQGNVLEGSIFGDTNISANNSMFVQGDRFDQSKVLTSPFNASSTDDFNFMFGSPFNMQSTDLSECLSGISHDDVTKQDASVWY

SEQ ID NO: 843 - protein, 194 aa, Vigna radiata var. radiata
MAKEGLGLEITELRLGLPDAEHVAVANKNGEKKNKRVFSEIDDVGDENSSSGGGGDRKMENKNQVVGWPPVCSYRKKNSVNEASKMYVKVSMDGAPFLRKMDLGMHKGYSDLAFALEKLFGCYGMVEALKNVENGEHVPIYEDKDGDWMLVGDVPWEMFMESCKRLRIMKRADAKGFGLQPKGSLKGFIESVGK

SEQ ID NO: 844 - protein, 601 aa, Lycopersicon esculentum
MGIFEDMGFSGNFEFLSDSMGCGAQEVEHKPVGLEEDDYSDEEMDVEELERRMWRDRMLLRRLKEKNKNKVVGDGAKQRQSQEQARRKKMSRAQDGILKYMLKMMEVCNAQGFVYGIIPEKGKPVTGASDNLRAWWKEKVRFDRNGPAAIAKYQADNQIPGRVEESSVIVSTPHTLQELQDTTLGSLLSALMQHCDPPQRRFPLEKGVSPPWWPSGKEEWWGQLGLPNDQVQPPYKKPHDLKKAWKVGVLTAVIKHISPDIAKIRKLVRQSKCLQDKMTAKESATWLAIINQEEALARKLYPDSYPQGSLAVGNGSFFISDASDYDVEGVDNERNNEVECKPHDINLQTGIMLPKDRVLMPGLAPVKGEIIDLTSDFIQKRKEPCFEESVDQKIYTCEYLHCPYSNYQAGFLDRTSRNNHQMSCPFRFNSAQTLTTPKYQINYEHNTVFPAQTATSKPAVSSVTASSSMSASGLGLPEDDQRIISDLITSYDNNFQQNGSICSGISEILVNQSLPQQQTVELPMDGNINLGHMETSAQETSMPVYRSTEFQYDQCKMSFDAPFGGNINDITDYRFGSPFNLGGSDYAVEQLTKQDISTWYL

SEQ ID NO: 845 - protein, 297 aa, Lycopersicon esculentum
MENNNVNDIGLINFLDEDNFEQFIELIRGETADPIVNFCPNYDCEHMTGCFSAANAQFEPILSSMDFYDTTLPDPISLYNCEIKLDNNDDEDDDESSGTTATTKMTPTSKGTRTDRSRTLISERKRRGRMKEKLYALRSLVPNITKMDKASIIGDAILYVQGLQTKAKKLKVEIAEFESSSGIFQNAKKMNFTTYYPAIKRITKMDINQVEEKGFYVRLICNKGRHIAASLFKALESLNGFNVQTSNLATSTNDYIFTFTLYVRECHEVDINFGNLKLWIASAFLNQGFDFETSPLV

SEQ ID NO: 846 - protein, 253 aa, Helianthus annuus
MGKGRLELKRIENKINRQVTFAKRRNGLLKKAYELSVLCDAEVALIIFSTRGKLYEFSSTSSMLKTLERYEKCSFGPPEQRKPAKEDLQEQSSYQEYMRLKERYDALKQLERNYYGEEIDSLTTNELESLERQLHCSLKQIRTIRTQSLIDKLYEQQKMEHQLYEYNKTLRLRLDEESQAEALQWDVHAHAHANGMVYGHHHQHQVSHPAHGAFYHPTGCETTLQIGYQTEQISGATSSSMSHHHHQMQGWPA

SEQ ID NO: 847 - protein, 199 aa, Glycine max
MDEVDLELENYEELFGMALSHSEELFENGGINSLFEAKDMSASAGDSHCQGAGAAEGSSAALVNPIQPACSNAASADSVMSTKTEPIVCFTARQSQSNISFSGVTKDSAGDYQDCGASSMLLMGEPPWCPPCPESSLHSANRSNAVMRYKEKKKTRKFEKKVRYASRKARADVRKRVKGRFVKAGDVYDYDPLNQTRSY

SEQ ID NO: 848 - protein, 859 aa, Arabidopsis thaliana
MASSEVSMKGNRGGDNFSSSGFSDPKETRNVSVAGEGQKSNSTRSAAAERALDPEAALYRELWHACAGPLVTVPRQDDRVFYFPQGHIEQVEASTNQAAEQQMPLYDLPSKLLCRVINVDLKAEADTDEVYAQITLLPEANQDENAIEKEAPLPPPPRFQVHSFCKTLTASDTSTHGGFSVLRRHADECLPPLDMSRQPPTQELVAKDLHANEWRFRHIFRGQPRRHLLQSGWSVFVSSKRLVAGDAFIFLRGENGELRVGVRRAMRQQGNVPSSVISSHSMHLGVLATAWHAISTGTMFTVYYKPRTSPSEFIVPFDQYMESVKNNYSIGMRFKMRFEGEEAPEQRFTGTIVGIEESDPTRWPKSKWRSLKVRWDETSSIPRPDRVSPWKVEPALAPPALSPVPMPRPKRPRSNIAPSSPDSSMLTREGTTKANMDPLPASGLSRVLQGQEYSTLRTKHTESVECDAPENSVVWQSSADDDKVDVVSGSRRYGSENWMSSARHEPTYTDLLSGFGTNIDPSHGQRIPFYDHSSSPSMPAKRILSDSEGKFDYLANQWQMIHSGLSLKLHESPKVPAATDASLQGRCNVKYSEYPVLNGLSTENAGGNWPIRPRALNYYEEVVNAQAQAQAREQVTKQPFTIQEETAKSREGNCRLFGIPLTNNMNGTDSTMSQRNNLNDAAGLTQIASPKVQDLSDQSKGSKSTNDHREQGRPFQTNNPHPKDAQTKTNSSRSCTKVHKQGIALGRSVDLSKFQNYEELVAELDRLFEFNGELMAPKKDWLIVYTDEENDMMLVGDDPWQEFCCMVRKIFIYTKEEVRKMNPGTVSCRSEEEAVVGEGSDAKDAKSASNPSLSSAGNS

SEQ ID NO: 849 - protein, 426 aa, Zea mays
MGRHSCCYKQKLRKGLWSPEEDEKLMNHITKHGHGCWSSVPKLAGLQRCGKSCRLRWINYLRPDLKRGAFAQDEEDLIIELHAVLGNRWSQIAAQLPGRTDNEIKNLWNSCIKKKLRQKGIDPSTHKPLTEADRGGAAPTISTERTSGSSDVNPSSTGPLGNLSPLLSETAQSSMLMPVYDKNRAETPNLARPKLPPKELFLEQLTAGHESPSTCHSSGQTLYFPFQQPLGYNSESGSSDGANMNSLWFNQSDFNCSTISTVMPPVSPSALSTSMGLNLPPDNPRHGGTGIGSTAVDSFYWDGTNPSSSSSTGSRGSNSMGFEPQSTSTILENSVFTWTDIGQEKDTRAHLVAELKWPDSFAETTTAMQNQSQTLYDDVIKAESQFSIEGICASWFQNQQPQQQLQVAPDMYDKDLQRMQLSFENI

SEQ ID NO: 850 - protein, 430 aa, Zea mays
MGRHSCCYKQKLRKGLWSPEEDEKLMNHITKHGHGCWSSIPKLAGLQRCGKSCRLRWINYLRPDLKRGAFSQDEEDLIIELHAVLGNRWSQIAAQLPGRTDNEIKNLWNSCIKKKLRQKGIDPNTHKPLTEADRSGAAPTISTERTSGSSDINPSSAGALGNLSHLLSETAQSSMLMPVYDKNRAETPNLARPKVPPKELFLEQLTAGHESPSTCRSSGQTLYFPFQQPLGYNSESGSGDGANMNSLWFNQSDFNCSTISTVMPPASPSALSTSMGLNLPPDNSRHGGTGIGSTAVDSFYWDGTNPSSSSSTGSRGSNSMGFEPQSTSSILENSVFPWTDIGQEKDTRAHLVEELKWPDLLHGTFAETTTAMQNQSQTLYDDVIKAESQFSMEGICASWFQNQQPQQQLQATPDMYDKDLQRMQLSFENI

SEQ ID NO: 851 - protein, 129 aa, Petunia axillaris
MSTSNASTSGVRKGAWTEEEDLLLRECIEKYGEGKWHLVPVRAGLNRCRKSCRLRWLNYVRPHIKRGDFSLDEVELILRLHKLLGNKWSLIAGRLPGRTANNVKNYWNTHLRKKLIVPHDQKQESKTKP

SEQ ID NO: 852 - protein, 120 aa, Petunia axillaris
MSTSNASTSGVRKGAWTEEEDLLLRECIEKYGEGKWHLVPVRAGLNRCRKSCRLRRLNYLRPHIKRGDFSLDEVDLILRLHKLLGNRWSLIAGRLPGRTANDVKNYWNTDLRKKLIAPHD

SEQ ID NO: 853 - protein, 270 aa, Hordeum vulgare subsp. vulgare
MEEEGGARKAVLFRLFGVEVRGAEEEEEDDAEPMELKKSTSMPNLASIGPILPRGEASASHDKGYASDDGELASTPQLKRRRRKAQERKKGIPWTEEEHRKFLEGLKQLGKGDWRGISKNFVTTRTATQVASHAQKYFLRQTNPGKKKRRASLFDVGIPAGHGYDDQLPSPHSVGTKLAPAEKILHTDRGDVPLPSYSEVIRGNNNNNTQMQADELTDHAKKRSKFPTGMSLTAMAASGLELAMSSSPSSILELSIGPPRHCAVDAIKVL

SEQ ID NO: 854 - protein, 808 aa, Oryza sativa
MPPAAMAPPPPPQGSSTGDPLYDELWHACAGPLVTVPRVGDLVFYFPQGHIEQVEASMNQVADSQMRLYDLPSKLLCRVLNVELKAEQDTDEVYAQVMLMPEPEQNEMAVEKTTPTSGPVQARPPVRSFCKTLTASDTSTHGGFSVLRRHADECLPPLDMTQSPPTQELVAKDLHSMDWRFRHIFRGQPRRHLLQSGWSVFVSSKRLVAGDAFIFLRGENGELRVGVRRAMRQLSNVPSSVISSQSMHLGVLATAWHAINTKSMFTVYYKPRTSPSEFIIPYDQYMESVKNNYSVGMRFRMRFEGEEAPEQRFTGTIIGSENLDPVWPESSWRSLKVRWDEPSTIPRPDRVSPWKIEPASSPPVNPLPLSRVKRPRPNAPPASPESPILTKEAATKVDTDPAQAQRSQNSTVLQGQEQMTLRSNLTESNDSDVTAHKPMMWSPSPNAAKAHPLTFQQRPPMDNWMQLGRRETDFKDVRSGSQSFGDSPGFFMQNFDEAPNRLTSFKNQFQDQGSARHFSDPYYYVSPQPSLTVESSTQMHTDSKELHFWNGQSTVYGNSRDRPQNFRFEQNSSSWLNQSFARPEQPRVIRPHASIAPVELEKTEGSGFKIFGFKVDTTNAPNNHLSSPMAATHEPMLQTPSSLNQLQPVQTDCIPEVSVSTAGTATENEKSGQQAQQSSKDVQSKTQVASTRSCTKVHKQGVALGRSVDLSKFSNYDELKAELDKMFEFDGELVSSNKNWQIVYTDNEGDMMLVGDDPWEEFCSIVRKIYIYTKEEVQKMNSKSNAPRKDDSSENEKGHLPMPNKSDN

SEQ ID NO: 855 - protein, 150 aa, Triticum aestivum
  misc_feature (51)..(51): Xaa can be any naturally occurring amino acid
PRPPPDFPHLPQAIQAASPPSRRPDPHRPETPTPLPEQEAPPVRNRAAVRXYREKKKEHTAVLQEEAARLRAMNEQLTKKVQDHAALEAEAARLRCLLVDVRGRIEGEIGAFPYQRRPAKGDGPGSAGPVMMSSCGFVRTCEQPPVCFHH

SEQ ID NO: 856 - protein, 251 aa, Arabidopsis lyrata
MGRGRVQLKRIENKINRQVTFSKRRAGLLKKAHEISVLCDAEVALVVFSHKGKLFEYSTDSCMEKILERYERYSYAERQLIAPESDVNTNWSMEYNRLKAKIELLERNQRHYLGEDLNAMSPKELQNLEQQLDTALKNIRTRKNQLMYESINELQRKEKAIQEQNSMLSKQIKEREKILRAQQEQWDQQNHGHNMPPPPPPQQHQIQHPYMLSHQPSPFLNMGGLYQEEDPMAMRRNELELTLEPVYNCNL

SEQ ID NO: 857 - protein, 618 aa, Nicotiana tabacum
MMMFEEMGFCGDLDFFPAPLKEVETAASQIEQEQEQEPVMDDDYSDEEIDVDELERRMWRDKMKLKRLKEMTKGGKEGVDAVKQRQSQEQARRKKMSRAQDGILKYMLKMMEVCKAQGFVYGIIPEKGKPVTGASDNLREWWKDKVRFDRNGPAAIAKYQADNAIPGKNEGSNPIGPTPHTLQELQDTTLGSLLSALMQHCDPPQRRFPLEKGVPPPWWPTGQEDWWPQLGLSKDQGPPPYKKPHDLKKAWKVGVLTAVIKHMSPDIAKIRKLVRQSKCLQDKMTAKESATWLAIINQEEVLARELYPDRCPPLSSAGGSGTFTMNDSSEYDVDGVVDEPNFDVQEQKPNHLGLLNVNVDRFKERLPMQQQSLPIKDEIMIANLDFTRKRKPADELTFLMDQKIYTCECLQCPHSELRNGFQDRSSRDNHQLTCPFRNSPQFGVSNFHVDEVKPVVFPQQYVQPKPASLPINQAPPSFDLSGIGVPEDGQRMINELMSFYDNNIQGNKSSMAGNVVMSKEQPRQQPSIQQNNYLHNQGIILDGNIFGDTNISANHSMFPQGDRFDQSKVLTSPFNAGSNDNFHFMFGSPFNLQSTDYTEALSGITQDNMPKQDVPVWY

SEQ ID NO: 858 - protein, 407 aa, Oryza sativa (indica cultivar-group)
MNYNFGGNVFDQEVGVGGEGGGGGEGSGCPWARPCDGCRAAPSVVYCRADAAYLCASCDARVHAANRVASRHERVRVCEACERAPAALACRADAAALCVACDVQVHSANPLARRHQRVPVAPLPAITIPATSVLAEAVVATATVLGDKDEEVDSWLLLSKDSDNNNNNNNNNDNDNKDNNNSNSSNNGMYFGEVDEYFDLVGYNSYYDNRIENNQDQQYGMHEQQEQQQQQQEMQKEFAEKEGSECVVPSQITMLSEQQHSGYGVVGADQAASMTAGVSAYTDSISNSISFSSMEAGIVPDSTVIDMPNSRILTPAGAINLFSGPSLQMSLHFSSMDREARVLRYREKKKARKFEKTIRYETRKAYAEARPRIKGRFAKRSDVQIEVDQMFSTAALSDGSYGTVPWF

SEQ ID NO: 859 - protein, 616 aa, Nicotiana tabacum
MMMFEEMGFCGDLDFFPAPLKEVETAASQIEQESEPVMDDDYSDEEIDVDELERRMWRDKMKLKRLKEMTKGGKEGVDAVKQRQSQEQARRKKMSRAQDGILKYMLKMMEVCKAQGFVYGIIPEKGKPVTGASDNLREWWKDKVRFDRNGPAAIAKYQADNAIPGKNEGSNPIGPTPHTLQELQDTTLGSLLSALMQHCDPPQRRFPLEKGVPPPWWPTGQEDWWPQLGLSKDQGPPPYKKPHDLKKAWKVGVLTAVIKHMSPDIAKIRKLVRQSKCLQDKMTAKESATWLTIINQEEVLARELYPDRCPPLSSAGGSGTFTMNDSSEYDVDGVIDEPNFDVQEQKPNHLGLLNVNVDRFKERLTMRQQSLPIKDEIIIANLDFTRKRKPADELSFLMDQKIYTCECLQCPHSELRNGFQDRSSRDNHQLTCPFRNSPQFGVSNFHVDEVKPVVFPQQYVQPKPASLPINQAPPSFDLSGLGVPEDGQRMINELMSFYDSNIQGNKNSMAGNVVMSKEQPRQQPSIQQNNYLHNQGIVLDGNIFGDTNISANHSVFPQGDRFDQSKVLTSPFNAGSNDNFHFMFGSPFNLQSTDYTEALSGITQDNMPKQDVPVWY

SEQ ID NO: 860 - protein, 107 aa, Glycine max
MNYNPQAADWALKRQMVHSMSRGIDWLFLVSDDSDFSEMLRRAREADLGTVVVGDWDRALGRHADLWVPWSGVEIGVGVRPFLDLVVAAVMFFPSENEDCKCVLMVW

SEQ ID NO: 861 - protein, 300 aa, Nicotiana tabacum
MMMFDDMRFCGDLDFFSAPLKEVEAAAPQTEPEPEPVVDDDYSDEEIDVDELERRMWRDKMKLKRLKEMTKSKEGVDPAKHRQSQEQARRKKMSRAQDGILKYMLKMMEVCKAQGFVYGIIPEKGKPVGGASDNLREWWKDKVRFDRNGPAAIAKYQADHAIPGMNEGSNPVGPTPHTLQELQDTTLGSLLSALMQHCDPPQRRFPLEKGVSPPWWPTGQEDWWPQLGLQKEQGPPPYKKPHDLKKAWKVGVLTAVIKHMFPDIAKIRKLVRQSKCLQDKMAAKESATWLAIISQEEALA

SEQ ID NO: 862 - protein, 467 aa, Zea mays
MMLKDLAAIQHQQQQLAADENMSNLTSASGDLQASVSSHPAPPPAKKKRSLPGNPDPDAEVIALSPRTLMATNRYVCEVCGKGFQRDQNLQLHRRGHNLPWKLKQRNPKEAVRKKAYVCPEPGCVHHDPARALGDLTGIKKHFSRKHGEKKWKCDRCAKRYAVHSDWKAHSKVCGTREYRCDCGTHFSRRDSFITHRAFCDALAEESARAVTAAAAVVVGQQQAAGGGDGSAGLHLPPDVLDPSQTLGGGHGMSLQELCLKREQQQQFAPSSWLTAHHQQELPGSARLLEQHEYIGSSTPESTAGLSGFVGLSPSAAGEAAASAHMSATALLQKAAQMGATLSRPSNQEQMASTHSHSSTTNAGTGSASAAAAAAINVPGTGAGAFGFGAPHHFGAEERTTTSADRDACGNAAAVSVVGANDGFTRDFLGLRAFSHGDILTMAGFDPCMSSAAYEQGHHQSSKQWHV

SEQ ID NO: 863 - protein, 57 aa, Secale cereale
KGKLPKDARLSLMNWWNTHYSWPYPTEEDKRRGRHDGLDQRQINNWFVNQRKRHWKP

SEQ ID NO: 864 - protein, 497 aa, Parvularcula bermudensis HTCC2503
MQHTVLIVDDDPVQCRLMQGVCERAGYCVVTMQDGQLAIDLLRSSDGDRVGVVMLDLLMPNLSGMELLEELKRFRPELPVIVLTGQGGVDTVVKAMQAGAADFFVKPASPERVVVSLRHVLDVKHLRGEVKRLQRRHDGGLAFNDLLESSPSLAACAKMGEKAASSTIPILITGESGVGKEMFARAIQGCSARSGGPFVTVNCGALPENLVESILFGHEKGAFTGATSKHAGKFQEAHGGTIFLDEVGELPLEAQVKLLRVLQEGEVDPVGAKRPVKVDVRVISATNRNLETEVASGSFREDLFYRLNVFPIHLPPLRERKADIPELIKHFISKYNAEENREVRGVRHEVLEVLVDQDWPGNVRQLENTIFRAVVLSAGKWLCADDFPLLADAFEEAGIASGPPPAMDHDGPANTVDGETAALAYYDHDHDAAPVPLPFLDGDGHIRPLADIERDLIEMAIDLYKGQMSEVARRLGIGRSTLYRKVQEQNIEVKRAS

SEQ ID NO: 865 - protein, 662 aa, Dianthus caryophyllus
MSFFENMGYYPNFEFPPQATVVREEEPVAEVEQEGNDEDYSDDDVDVDELERRMWRDKMLLKRLKEQNKDRCREGIDNVKKRQSQEQARRKKMSRAQDGILKYMLKMMEVCKAQGFVYGIIPEKGKPVSGASDNLRAWWKDKVRFDRNGPAAIAKYQADHLVQGMDEDCTAMGSTPHTLQELQDTTLGSLLSALMQHCDPPQRRFPLEKGHPPPWWPVGNEIRLPGLGIPNDQGPPPYKKPHDLKKAWKVSVLTAVIKHMSPDIEKIRKLVRQSKCLQDKMTAKESATWLAIVNQEESLARKLFPDRCPPPAPGGGGSLVISDTSDYDVDGAGPDSSSDVEDCKPQNINVFNFREKFMGHPVNMITPAIKGEVVETGFDFPVKRKQPSSGSQTVIDQKVFLCENPQCPYNDPCLGFPDRILRHDHQLNCPFRSRGVEVTNTQTTLEKHPSSESTNFTSSFAQQEKFSLQSAMQSPATFNPCTGTVLETGDQLQQNMQRKTTDGRFVGQGSALYGNSTYLGQQSQFQIDNVGFFASHGGNGSQGMFVNGKNNNQVKQKPSLQMSNGFNGVSPSRQQMQAPMDGGFRGLSNMSGNIPQRTKTSAGHPVFSSGGMQQQQQLDQCRTFDSSFPMHLNDDITDFGFNSPFNIDFEPLLRPDNPIWNI

SEQ ID NO: 866 - protein, 698 aa, Solanum demissum
MSLNRTCNSSFWTKEEDKAFENALAVFSGDNDKFLKIAAAVPGKSLQEIIDHYNVLVEDINDIESGKVPLPKYERMQSSSSCRRRSLGAGVERRKGLPWTAEEHRSFLQGLAKHGKGDWRGISRNFVFSRTPTQVASHAQKYYSRLNDNNAKRRKSIHDVTSVGAANITEPSQGQKSDELTGPCGGQSQWPIADYVTEAFDTGMLSLPGSVTNCTTDAIEGPSAVNPEKFPLVAALGSELNSSFPGVDEFLQSVEDLIIVPAEGTSGVCHGVDTRTSPSLSVQPSVTGGTGMYTHPVSFPDVHEFLQEVEDLITVPAEGTSGACHGIDTRTSPSLSLQSSVAGGTRMYTHSVTVPAEGTSGVRCGIDTRTSPSLSLQPSVAGGTRMYPHPVNVLAEGTSGASHGVDTRTSPSLSLQPSVAGGSRIYPHPVNVPAEGISGVSHGVDTRTSPSLSLQPSVGGGTGMYTHPVTVRVEGTSGARRGVDTRTSPSLSLQPSVVGGIGMYTHPIIVPAEGTSGTRRGVDTRTSPSLSFQPSVGGGTGMYTHPVTVLAEGTSGVRCGVGTRTSPSLGLQPSVAGGTRMYTHAVNNVGYDLEELMTKQLVGASQEGPSINTASLPSPIADHIGLHGCTTSSSVAKNGFVSTMEAPGGGFSVDSMQTPSIPGHIGGGTYPCWEPSSKDDSIFDLEYLYTDHMFGFRK

SEQ ID NO: 867 - protein, 323 aa, Arabidopsis thaliana
MVRPPCCDKGGVKKGPWTPEEDIILVTYIQEHGPGNWRAVPTNTGLLRCSKSCRLRWTNYLRPGIKRGNFTEHEEKMIVHLQALLGNRWAAIASYLPQRTDNDIKNYWNTHLKKKLNKVNQDSHQELDRSSLSSSPSSSSANSNSNISRGQWERRLQTDIHLAKKALSEALSPAVAPIITSTVTTTSSSAESRRSTSSASGFLRTQETSTTYASSTENIAKLLKGWVKNSPKTQNSADQIASTEVKEVIKSDDGKECAGAFQSFSEFDHSYQQAGVSPDHETKPDITGCCSNQSQWSLFEKWLFEDSGGQIGDILLDENTNFF

SEQ ID NO: 868 - protein, 267 aa, Hordeum vulgare subsp. vulgare
MGRSPCCEKAHTNKGAWTKEEDDRLTAYIKAHGEGCWRSLPKAAGLLRCGKSCRLRWINYLRPDLKRGNFSHEEDELIIKLHSLLGNKWSLIAGRLPGRTDNEIKNYWNTHIRRKLTSRGIDPVTHRAINSDHAASNITISFESAQRDDKGAVFRRDAEPAKAAAAAAAISHHVDHHHRSNPQLDWGQGKPLKCPDLNLDLCISPPIHEDPMVDTKPVVKREAGVGVGVVGLCFSCSMGLPRSSDCKCSSFMGLRTAMLDFRSIEMK

SEQ ID NO: 869 - protein, 251 aa, Hordeum vulgare subsp. vulgare
MGRSPCCEKEHTNKGAWTKEEDQRLIAYIRANGEGCWRSLPKAAGLLRCGKSCRLRWMNYLRPDLKRGNFTDDEDELIIRLHSLLGNKWSLIAGQLPGRTDNEIKNYWNTHIKRKLLSRGMDPHTHRPLTAVIDAAAPTRPAQIAVPARAAPTTMFALPTKQQQPPVPVESSDDDGSSGATSTGEPRCPDLNLDLSVGPPAADTPTSHPVCLCRHLGFRGGEACSCRQADSAGSQGGGFRYFRPLEEGQYI

SEQ ID NO: 870 - protein, 696 aa, Oryza sativa
MLLGALRMEERKGLMGRERDQFPVGMRVLAVDDDPVCLKVLETLLRRCQYHVTSTNQAITALKLLRENRDMFDLVISDVHMPDMDGFKLLELVGLEMDLPVIMLSVNGETKTVMKGITHGACDYLLKPVRIEELRNIWQHVVRRKFGNRERNNLDFSKECNKPQSADTDHGPYQPTCGSSDQNGRSSRKRKELHGEDDDEGDDNDYQENDEPSAAKKPRVVWSVELHRKFVAAVNQLGIDKAVPKRILELMNVEKLTRENVASHLQKYRLYLKRLGAVASQQASIVAAFGGRDPSFLHIGAFEGLQSYQPFAPSAALPSFNPHGLLTRTSAAAAFGLQELAAPSSTIQTSTGNVTVGHCLEENQQANLAQGLTAAIGQPQLQQNWIHQEGNGLSDVFSGSSLTNTLSSTLQRVPSSSLPPQELLECKQAKVSMPPSIRIPPSSSALLERTLGVSTNLGDSSISQQGALPIDGGFSADRLPLHSSFDGAVATKLDTSLAASQREIGQQGKFSVSMLVSPSDNLALAKNAKTGASSSGSTIILPLDTARHSDYLQFGGASNSLQKMDGQKQDHIQSSNIIWSSMPSTQLPSDTQIHNTQNQRLDSGSFNHNIGAHLADQTNASASILPQMKFDTRISEEKMKQKNTYDLGSSKLQGGFNSSGCNFDGLLNSIIKVEKDDLPFMDNELGCDLFPLGACI

SEQ ID NO: 871 - protein, 302 aa, Hordeum vulgare subsp. vulgare
MGRPSSGAVGQPKVRKGLWSPEEDEKLYNHIIRHGVGCWSSVPRLAALNRCGKSCRLRWINYLRPDLKRGCFSQQEEDHIVALHQILGNRWSQIASHLPGRTDNEIKNFWNSCIKKKLRQQGIDPATHKPMASADTATAAAALPDAEEEDRKPLCPAVDGSLVPKQPAVFDPFPLCVDYGAGFAEELGAANAAALYGQLCGGKEVADDDAGFGAADYSCVLDVSENLGYGESSSNSSNWNYGGEVGSVLDGEVPHWAKPEPAFAEMERQQQHSPAEQKLSLPCQEQSLLASFDFNLELEPYF

SEQ ID NO: 872 - protein, 113 aa, Brassica napus
  misc_feature (10)..(10): Xaa can be any naturally occurring amino acid
  misc_feature (92)..(92): Xaa can be any naturally occurring amino acid
AKGKHYRGVXQRPWGKFAAEIRDPAKFGARVWLGTFEKAEDAALAYDRAAFRMRGSRALLNFPWRVNSGEPDPVRIPSKRSYTSSSSSDKGXPKRRRNTEEVPSELQVKCEVA

SEQ ID NO: 873 - protein, 101 aa, Zea mays
MSASRSSSPNSMSQWSQKENKMFEEALAYYGEGTPNRWDKVSSAMGGIKSAEEVRCHYENLDYDVKMIESGNVPYPKYKTQGFWTRGKVHGTSKANWKHIT

SEQ ID NO: 874 - protein, 450 aa, Arabidopsis thaliana
MNSDGVWLDGSGESPEVNNGEAASWVRNPDEDWFNNPPPPQHTNQNDFRFNGGFPLNPSENLLLLLQQSIDSSSSSSPLLHPFTLDAASQQQQQQQQQQEQSFLATKACIVSLLNVPTINNNTFDDFGFDSGFLGQQFHGNHQSPNSMNFTGLNHSVPDFLPAPENSSGSCGLSPLFSNRAKVLKPLQVMASSGSQPTLFQKRAAMRQSSSSKMCNSESSSEMRKSSYEREIDDTSTGIIDISGLNYESDDHNTNNNKGKKKGMPAKNLMAERRRRKKLNDRLYMLRSVVPKISKMDRASILGDAIDYLKELLQRINDLHTELESTPPSSSSLHPLTPTPQTLSYRVKEELCPSSSLPSPKGQQPRVEVRLREGKAVNIHMFCGRRPGLLLSTMRALDNLGLDVQQAVISCFNGFALDVFRAEQCQEDHDVLPEQIKAVLLDTAGYAGLV

SEQ ID NO: 875 - protein, 259 aa, Glycine max
MEESQYLLWIKRKQILKSHIQQPFGTSNNNNSSSWEERAFAEDAARILGGCIWPPRSYSCNFCKREFRSAQALGGHMNVHRRDRARLKQSLSHHNEALQHHQKNDCTVATSKVSSSRASTISTQEICSHQPTMSLYSSLIGWGHHHHMESPDSEPKGQVNAREEFLKGLGCNDYVETSLSVGQSAVFGQKLPTTESCGDESISYKRSKTSMPPLPGVFLKPCSNDRNLTFQSAEFVLGLKPGMEDLDLELRLGKPQKVI

SEQ ID NO: 876 - protein, 188 aa, Brassica napus
  misc_feature (4)..(4): Xaa can be any naturally occurring amino acid
  misc_feature (14)..(14): Xaa can be any naturally occurring amino acid
  misc_feature (24)..(24): Xaa can be any naturally occurring amino acid
IIFXEWWKDKVRFXLNGPIAIAKXQESNNMVCESNEEGNNIANQLSQKLLRDLQDPTLGWLLSALMPHCDPPQRRFPFEKRVRPPWWPTGEEYWWPKDQGPAPPYKKPHDLKKSWKIGVLTSVIKHLSPICRNRNGLFASSKFHVMPMHDRNINGNQSCLVEGNQSVNLQPEAQNHQEHWHFGRTEGN

SEQ ID NO: 877 - protein, 243 aa, Ipomoea batatas
MGRGRVELKRIENKISRQVTFSKRRSGPLKKAHEISVLCDAEVGLIVFSTKGKLFEYSTDSSMENILDRYERYSYAEQRMTTNVSEQQQNWPCQYPKLVSRIELLQRSTRNFLGDDLEPLGLRELQSLEQQLDTGLKRIRTRKNQLMHESISELQKKERALQVQNNILAKQVELEQQKLVLNSASTSMPSQPLVSPLPLPNLTIGSIARATEAAKNSENRGQALPCSTSLVPPWMLRHPNNKD

SEQ ID NO: 878 - protein, 376 aa, Festuca pratensis
MNSNSSSTIYDEAVGQEGSWRRLCDGCCMVPSVVYCHADSAYLCASCDVRIHSANRVASRHERVCLSVAHEHAPALLQCRTDAVASCAAYEAQAHYANLLAGMHQCVPVVSHPATAILADSLLAEAAVATTIRSCKEEEASWLLLSKNSANHNCSGDNRSSSTYFGEVDEYFDLVGYNSYYDSRMNNNRAQYVMQEQQHLQPMQKEYAEKEGSECVVPSQFATVSKPQQSGYALVGAEQAASMTAGVSVYTDSVNNSISFSSMEGGIVPDNTVVDLPHSIIPTPAGASSLHSGPPLQMPLHFSSMDREAKVLRYKEKKKTRTFEKTTRYATRKAYAEARPRIKGRFAKISEAEMEVDQMFSAAALSDSSYSTVPWF

SEQ ID NO: 879 - protein, 98 aa, Brassica napus
  misc_feature (82)..(82): Xaa can be any naturally occurring amino acid
FELPLISSSMDFTLYELIRHYHSSSHTHTGTPPGPINTHTHTCVHVHTKILHDKADDTYESSWSKNQTTPLANRAAVRKHRXMKTAKAASLEDEVIML

SEQ ID NO: 880 - protein, 596 aa, Arabidopsis thaliana
MTVEQNLEALDQFPVGMRVLAVDDDQTCLKILESLLRHCQYHVTTTNQAQKALELLRENKNKFDLVISDVDMPDMDGFKLLELVGLEMDLPVIMLSAHSDPKYVMKGVTHGACDYLLKPVRIEELKNIWQHVVRSRFDKNRGSNNNGDKRDGSGNEGVGNSDPNNGKGNRKRKDQYNEDEDEDRDDNDDSCAQKKQRVVWTVELHKKFVAAVNQLGYEKAMPKKILDLMNVEKLTRENVASHLQKFRLYLKRISGVANQQAIMANSELHFMQMNGLDGFHHRPIPVGSGQYHGGAPAMRSFPPNGILGRLNSSSGIGVRSLSSPPAGMFLQNQTDIGKFHHVSSLPLNHSDGGNILQGLPMPLEFDQLQTNNNKSRNMNSNKSIAGTSMAFPSFSTQQNSLISAPNNNVVVLEGHPQATPPGFPGHQINKRLEHWSNAVSSSTHPPPPAHNSNSINHQFDVSPLPHSRPDPLEWNNVSSSYSIPFCDSANTLSSPALDTTNPRAFCRNTDFDSNTNVQPGVFYGPSTDAMALLSSSNPKEGFVVGQQKLQSGGFMVADAGSLDDIVNSTMKQEQSQGDLSGGDLGYGGFSSLRTCI

SEQ ID NO: 881 - protein, 368 aa, Glycine max
VNRKKKPTMGRPPCCDKVGIKKGPWTPEEDIILVSYIQEHGPGNWRSVPTNTGLSRCSKSCRLRWTNYLRPGIKRGNFTPHEEGMIIHLQALLGNKWAAIASYLPQRTDNDIKNYWNTHLKKKLKKFQAALDPHSASDSTASGQFLPKSFSDRRSTLDISSNNNNNHGSSIRLSHHQSQSSSTTTYASSTENISRLLEGWMRSSPKQLNKGSIISQYDEDHQLQGINDDDDNNNNNFVSTTKLVNLHHLHQHKIRNKDHEQEGGGVDNNMVSHHEEFDSILSFENQNNAAWDKSTCDSMPEKSSEASAAADHHHHHHHDIAAAHERNNVRQKSENSSGAPPLSFLEKWLLDENVGHQVEEMMELSPMF

SEQ ID NO: 882 - protein, 388 aa, Arabidopsis thaliana
MCGGAIISDFIPPPRSLRVTNEFIWPDLKNKVKASKKRSNKRSDFFDLDDDFEADFQGFKDDSAFDCEDDDDVFVNVKPFVFTATTKPVASAFVSTVGSAYAKKTVESAEQAEKSSKRKRKNQYRGIRQRPWGKWAAEIRDPRKGSREWLGTFDTAEEAARAYDAAARRIRGTKAKVNFPEEKNPSVVSQKRPSAKTNNLQKSVAKPNKSVTLVQQPTHLSQQYCNNSFDNSFGDMSFMEEKPQMYNNQFGLTNSFDAGGNNGYQYFSSDQGSNSFDCSEFGWSDHGPKTPEISSMLVNNNEASFVEETNAAKKLKPNSDESDDLMAYLDNALWDTPLEVEAMLGADAGAVTQEEENPDFAVGGWYKSHLKLYALVSHEPLFHREFLF

SEQ ID NO: 883 - protein, 343 aa, Arabidopsis thaliana
IGVKKGPWTPEEDIILVSYIQEHGPGNWRSVPTHTGLRRCSKSCRLRWTNYLRPGIKRGNFTEHEEKTIVHLQALLGNRWAAIASYLPERTDNDIKNYWNTHLKKKLKKINESGEEDNDGVSSSSTSSQKNHQSTNKGQWERRLQTDINMAKQALCEALSLDKPSSTLSSSSSLPTPVITQQNIRNFSSALLDRCYDPSSSSSSTTTTTTSNTTNPYPSGVYASSAENIARLLQDFMKDTPKALTLSSSSPVSETGPLTAAVSEEGGEGFEQSFFSFNSMDETQNLTQETSFFHDQVIKPEITMDQDHGLISQGSLSLFEKWLFDEQSHEMVGMALAGQEGMF

SEQ ID NO: 884 - protein, 749 aa, Oryza sativa
GRPPWCSSPAGTSASAAIASPPATWTWPWRAPSAIASGQGAWRPSSVELSSSHLGTHGGFSVLRRHADECLPPLDMSRQPPTQELVAKDLHGVEWRFRHIFRGQPRRHLLQSGWSVFVSAKRLVAGDAFIFLRGETGGLRVGVRRAMRQQTNVPSSVISSHSMHLGVLATAWHAVNTGTMFTVYYKPRTSPAEFVVPYDRYMESLKRNYSIGMRFKMRFEGEEAPEQRFTGTIVGMGDSDPAGWPESKWRSLKVRWDEASSIPRPERVSPWQIEPAVSPPPVNPLPVPRTKRLRPNATALPADSSAIAKEAATKVVVESEPNGTQRTFQTQENATPKSGFGNSSELESAQKSIMRPSGFDREKNNTPIQWKLGSDGWMQMSKPESYSEMLSGFQPPKDVQTPQGFCSLPEQITAGHSNFWHTVNAQYQDQQSNHNMFPSSWSFMPPNTRLGLNKQNYSMIQEAGVLSQRPGNTKFGNGVYAALPGRGTEQYSGGWFGHMMPNSHMDDTQPRLIKPKPLVVAHGDVQKAKGASCKLFGIHLDSPAKSEPLKSPSSVVYDGTPQTPGATEWRRPDVTEVEKCSDPSKAMKPLDTPQPDSVPEKPSSQQASRNMSCKSQGVSTRSCKKVHKQGIALGRSVDLTKFNGYEELIAELDDMFDFNGELKGPKKEWMVVYTDNEGDMMLVGDDPWIEFCDMVHKIFIYTREEVQRMNPGTLNSRSEDSHANSMERGSVGREMRGCLSTSSLNSENC

SEQ ID NO: 885 - protein, 283 aa, Zea mays
  misc_feature (122)..(122): Xaa can be any naturally occurring amino acid
  misc_feature (261)..(261): Xaa can be any naturally occurring amino acid
RLAVRGSSGMEWADERAGGAEGLAGYVKVMTDEQMEVLRKQISIYATICEQLVEMHRALTEHQDTIAGIRFSNLYCDPQIIPGGHKITARARWQPTPMQLQILENIFGNQHQCSSASWRTSXDQGNGTPSKQRIKEITAELSHHGQISETNVYNWFQNRRARSKRKQAASLPNNAESEAEVDEESLTDKKPKSDRSLQDNKAMGAHNADRISGMHHLDTDHDQIGGMMYGCNDNGLRSSGSSGQMSFYGNIMPNPRIDHFXGKVESSRSFSHLQHGEGFDMFG

SEQ ID NO: 886 - protein, 369 aa, Medicago truncatula
MGRHSCCYKQKLRKGLWSPEEDEKLLNYITKHGHGCWSSVPKLAGLQRCGKSCRLRWINYLRPDLKRGAFSQQEENLIIELHAVLGNRWSQIAAQLPGRTDNEIKNLWNSCLKKRLRQSGIDPNTHKPLSEVENDNEKSLTSNKTNQKGSVSSNEVMSLMIEPTKPSIEGYPLEVSTTSKINNSSSSSHELFLDTRFGSSSSYFSFQNLNYGSNIGISENPNASSICFTPTSTSSQIMSDTNSVITSNMLHSVSPSIFSTPTHVKPTVSVSSVDGVHNWEASSYNNINNTNNGALPLQEEMKWSEYLNTPFLMQNQPSPSMYTEAKPETGFITDESCTSWQQQQQQNFQLSDIYSKDLQRFSVAFGQSM

SEQ ID NO: 887 - protein, 323 aa, Oryza sativa
  misc_feature (14)..(14): Xaa can be any naturally occurring amino acid
MGRPPCCDKVGVKXGPWTPEEDLMLVSYIQEHGAGNWRAVPTNTGLMRCSKSCRLRWTNYLRPGIKRGNFSEQEEKLIVHLQALLGNRWAAIASYLPERTDNDIKNYWNTHLKKKLKKMQAAGGGEDSGAASEGGGGRGDGDGGGKSVKAAAPKGQWERRLQTDIHTARQALRDALSLDHPDPSPATAAAAATPAGSSAAYASSADNIARLLQGWMRPGGGGGGNGKGPEASGSTSTTATTQQQPQCSGEGAASASASASQSGAAAAATAQTPECSTETSKMATGGGAGGPAPAFSMLESWLLDDGGMGLMDVVPLGDPSEFF

SEQ ID NO: 888 - protein, 129 aa, Bordetella bronchiseptica RB50
MVDKGMKILVVDDFPTMRRIIRNLLKELGFENVDEAEDGAIGLEKLRNGAFQFVVSDWNMPNLDGLEMLKQIRADAALKSLPVLMVTAEAKKENIVAAAQAGANGYVVKPFTAATLEEKLNKIFEKLAG

SEQ ID NO: 889 - protein, 175 aa, Betula platyphylla
MNLGKVDGSCYQKMVKKEAEEDQVSDEELVESGVEEEKKKKGVVGSGGKRCCQAEKCTADLSDGKQYHKRHKVCEHHAKAQVVLVGGMRQRFCQQCSRFHELSEFDETKRSCRRRLAGHNERRRENTAESHAEGSSRKGTGTHQLKDIVCGQVDDRGRIQITIHENSTYKHFQIR

SEQ ID NO: 890 - protein, 226 aa, Brassica napus
  misc_feature (27)..(27): Xaa can be any naturally occurring amino acid
  misc_feature (29)..(29): Xaa can be any naturally occurring amino acid
  misc_feature (215)..(215): Xaa can be any naturally occurring amino acid
PASSFFFWVCVLGCLFFFSGPGSVFPXFXEMGMLGGNMDLYSSSSLGELDFCPAPQLEPDSIVEDDYTDDEIDVDELERRMWRDKMRLKRLKEQDKSSKQGVDYDSAKQRQSQEQARRKKMSRAQDGILKYMLKMMEVCKAQGFVYGIIPENGKPVTGASDNLREWWKDKVRFDRNGPAAIAKYQADNNVPGACESNGLIGPTPHTLQELQDTTXLGRFLSALMQH

SEQ ID NO: 891 - protein, 208 aa, Brassica napus
MTEESPEEDHKSPEGAETNLGSSSLKNNNINNKEQDRFLPIANVGRIMKKVLPGNGKISKDAKETVQECVSEFISFVTGEASDKCQREKRKTINGDDIIWAITTLGFEDYVAPLKIYLGKYRETEGEKVNSPKQRHQQQQPQHNHHFQFQEQDHNNISCTSYISQHHPSPFLPADHQPFPNLPFSPKSLQNQFPQQNDNTDSMGQWSV

SEQ ID NO: 892 - protein, 323 aa, Roseovarius nubinhibens ISM
MRILAVDDDPIILTLLVEVLRAAGFTDVVTAESGADALRAIDTTNTAFDCFLLDIQMPEMDGIELVQKIRGYKAYEATPVLMITAMSQRKYIDAAFAAGASDYITKPFEIGEVHARLRLVSSLAETRRAGGIPEHHEEIATDRPVDLARRVKLHDVDGFIDYLAMENYLLQVSRISLIGMRTFGVIIPEMKRVLAHSTPYEYESVVADMAEAISDTLKPQSFFAAHAGGGEFICVLLNCNSFDGDDFNHRLNETITEMDLHYSNGAPMSLRAVVGDDFSLKLKSPKGVSQTLVQALAAAEMVERQPQRKEPQKSSLLQLFGFG

SEQ ID NO: 893 - protein, 449 aa, Oryza sativa (indica cultivar-group)
MSASASAACLLPPRGGSLARPDTALPPASQPATVAVKQNIPRLASPRLAVTSITLLPRRGRRCAVDLLLLHLHRLLLFLSLFSEETPNLFLPRKPAAFLKRIKSPSLIRRRNPSPQNLAAPRAVLGFELMAVEEASSSSGGGRGGGGGGGGEEGLSGCGGGWTREQEKAFENALATVGDDEEEGDGLWEKLAEAVEGKTADEVRRHYELLVEDVDGIEAGRVPLLVYAGDGGVEEGSAGGGKKGSAGGGGGGGGGGGHGEKGSAKSAEQERRKGIAWTEDEHRLFLLGLEKYGKGDWRSISRNFVISRTPTQVASHAQKYFIRLNSMNRERRRSSIHDITSVNNGDTSAAQGPITGQPNGPSANPGKSSKQSPQPANAPPGVDAYGTTIGQPVGGPLVSAVGTPVTLPVPAAPHIAYGMHAPVPGAVVPGAPVNMPPMPYPMPPPTSHG

SEQ ID NO: 894 - protein, 321 aa, Tulipa gesneriana
MAAFSYKQQQHQSNLLLDSTDHHHLSFQFQDLMTNSTSPFLYYPMPTSATNSTLDSASDNQKDCSSSVAEPQSSTEIRKRKDKSDGSCMTSVQSKGTKRETKSRKSQKKPKANESDEMKERTQEEEEAPVGYIHVRARRGQATDSHSLAERVRREKISERMKLLQALVPGCDKVTGKAVMLDEIINYVQSLQNQVEFLSMKLATVSPMLYEFGLDIEGQMNDLERVGSFPQDSQLLVPKTIPFQHRVCEEDTRSYSIGETSAPFLLHDQGPLSFSGVPFSVEMGTKHKAFSVNFCSTTSHLPTIENRRADKGRWGYGRKST

SEQ ID NO: 895 - protein, 146 aa, Brassica napus
  misc_feature (48)..(48): Xaa can be any naturally occurring amino acid
NFRSSRPCLGKPSSSLFSKSKIIFIFCCCKELRGDQHVSSFDSLSGVXESKIDMDGEEIEPWARASGGCSHTHSCNPPGPEDASHSHTCFHTHTHLIIPDSQENDHSDSSNKRRPCGNREAVRKYREKKKARTAYLEDEVKRLQSM

SEQ ID NO: 896 - protein, 247 aa, Hordeum vulgare subsp. vulgare
FGDGMGWDDEDELDQQSMDASSLGVSASLENAAVGAPGGGGGGGNGKGKKKGMPAKNLMAERRRRKKLNDRLYMLRSVVPKISKMDRASILGDAIDYLKELLQRISDLHSELESAPSSAALGGPSTANTFLPSTPTLQPFPGRIKEERCPPAPFPSPSGQQATVEVRMREGQAVNIHMFCARRPGILLSTMRALDSLGLDIEQAVISCFDGFAMDVFRAEQCREGPGLLPEEIKAVLLHCAGLQNAM

SEQ ID NO: 897 - protein, 260 aa, Oryza sativa
AEESFDRSGEMGRGRVELKRIENKINRQVTFSKRRNGLLKKAYELSVLCDAEVALIIFSSRGKLYEFGSAGITKTLERYQHCCYNAQDSNNALSETQSWYHEMSKLKAKFEALQRTQRHLLGEDLGPLSVKELQQLEKQLECALSQARQRKTQLMMEQVEELRRKERQLGEINRQLKHKLEVEGSTSNYRAMQQASWAQGAVVENGAAYVQPPPHSAAMDSEPTLQIGYPHQFVPAEANTIQRSTAPAGAENNFMLGWVL

SEQ ID NO: 898 - protein, 146 aa, Glycine max
  misc_feature (34)..(34): Xaa can be any naturally occurring amino acid
  misc_feature (43)..(43): Xaa can be any naturally occurring amino acid
  misc_feature (123)..(123): Xaa can be any naturally occurring amino acid
MVQAKKFRGVRQRQWGSWVSEIRHPLLKRRVWLXTFETAECSXQGAYDQAAILMNGQNAKTNFPTSKNQAEADHDNNNTFLSPKALSELLSTKLRKYCKDPAPSLTCLRLDADNSHIGVWQKXGSDHILAPTVVMRVELGKKQIIT

SEQ ID NO: 899 - protein, 333 aa, Zea mays
KGDQKGGVSPGGGGPFKKKGVPPGGRNFPGALSLDILIWKPFPSRALRPSSVSFIHTERETQKTKTLRKEMMEWDNQQQPSNNPSSNLQGIDVNGGSGSGGMYVKVMTDEQLETLRKQIAIYATICERLVEMHKTLTSQQDLAGRVGGLYADPTFGHKMTGGRQRWTPTPVQLQILERIFDQGIGTPSKQKIKDITEELSQHGQIAEQNVYNWFQNRRARSKRKQHGGGGGGVGSSSNNNNGESEVEAETETVNEKRKMPESLLVFPDGNKNAIGTTSATSPRPEDLYFQSPEMSSDLDLLGVLSNPRDEHFVGKMGLSESYNMYDHVEDYGM

SEQ ID NO: 900 - protein, 172 aa, Antirrhinum majus
KATELRLGLPGTDESEPQTSSSIKNNNNKRSSSEMQGSCQKSTQQEESIAPAPKAQVVGWPPVRSFRKNVMKASESDGSGMFVKVSMDGAPYLRKIDLKFYNNYFDLLKALENMFKCTIGVYSEREGYNGSEFAPTYEDKDGDWMLVGDVPWDMFITSCKRLRIMQSKLCCL

SEQ ID NO: 901 - protein, 122 aa, Brassica napus
  misc_feature (21)..(21): Xaa can be any naturally occurring amino acid
GLLNRRHSYSRLFDSWKGVPXSQAKVMSEVYLGKQICNLVACEGPARVERHETLSQWANRFGTSGFAPAHLGSNAFKQASMLLALFNGGEGYRVEENNGCLMLGWHTRPLITTSAWKLSAAH

SEQ ID NO: 902 - protein, 584 aa, Zea mays
MALTDATAFPYGLRVLVVDDDPTWLKILEKMLRKCSYEVTTCGLASVAIQILRERRNKFDIVISDVNMPDMDGFKLLELIGLEMDLPVIMMSIDGETSRVMKGVQHGACDYLLKPVRMKELRNIWQHVYRKKMHEVKEIEGNDSYDDLQMFRNGVEGFDERDLFMRADSDTMRKRKDVNKDHADQDSSDGATVKKARVVWSVDLHQKFVNAVNQIGFDKVGPKKILDLMNVPGLTRENVASHLQKYRLYLSRLQKQNEERIMGAARQDFNQKGPSDHLNLRSSFQEQPGNLSNGCQHSSQKVEAQTNILDPHLDDTKTSMPLKVPDKNGISASDAVDPQNITTASPLSGVFSFERMPVNQDRKLSETMILECQSWSGSVPPKQFMQYPKHNHERCDLLGDYSCLPKPDLEHPIAPGHLYAPPPVISMSYNVEEDVRDFSDVKPDLLGCMKSLSPALTCTVESVSAQLSDSVVTSTNSDRKFSSVEGLSSIKDCDFDQERNGAILFTSEEASILCGTDFTCLPEDLSGYQLQGVSFGNKGLNSIDLYQCNDTMLIPGLQNNWYDDDVEFSSETVEFPLLDGGLFA

SEQ ID NO: 903 - protein, 124 aa, Gossypium barbadense
IEKVVSSIKAMKPKIVTVVEQEANHNGPVFLDRFTEALHYYSTLFDSLEGSGVAPPSQDLAMSELYLGRQICNVVACEGMDRVERHEPLTQWRTRMETAGFSPVHLGSNAYKQASMLLALFASG

SEQ ID NO: 904 - protein, 840 aa, Oryza sativa (japonica cultivar-group)
MAAAATAAASPVEGLTGGGGGGGGGVDGLFVELWRACAGPLVTVPAVGERVFYLPQGHIEQVEASTNQVAEQQGAPLYNLPWKIPCKVMNVELKAEPDTDEVYAQLTLLPEKQDGNGSGNGNVSKDKVEEEEVVPPAATERPRVHSFCKTLTASDTSTHGGFSVLRRHADECLPPLDMSQHPPTQELVAKDLHGVEWRFRHIFRGQPRRHLLQSGWSVFVSAKRLVAGDAFIFLRGENGELRVGVRRAMRQQANIPSSVISSHSMHLGVLATAWHAVNTGTMFTVYYKPRTSPSEFVVPRDLYKESLKRNHSIGMRFKMTFEGEEAAEQRFTGTIVGVGDSDPSGWADSKWRSLKVRWDEAASVPRPDRVSPWQIEPANSPSPVNPLPAPRTKRARPNVLASSPDLSAVNKEVASKVMANSQQNGLPRAFHSQENMNLRSRFGDSNELNTSQKLTMWSSGSNQEKNNVSVQRELGSQSWMQMRRPDGSSEILSGFQPLKDTRNPLSSFPSQISGNRSNTWNTINVHYPDQNANHNMYPGTWSLMPPNTGFGVNQQNYLMTPDITLPQRSLNAKFGGNGAFTSLRAHGIDQRSSGWLGHIEPSSHIDDASSSLIKPQPLVIDHNVQKAKGSSCMLFGISLDSPAKPELLISPPSVAFDGKLQQDALEEDECSDPSKTVKPLDGAQHDSAREKHQSCPDGTKNIQSKQQNGSSRSCKKVHKQGIALGRSIDLTKFTCYDELIAELDQMFDFNGELNSSSKNWMVVYTDNEGDMMLVGDDPWNEFCNMVHKIFIYTREEVQKMNPGALNSRSEDSRSTSVERGLVGEGLQGGLSTPSLNSENC

SEQ ID NO: 905 - protein, 216 aa, Triticum aestivum
SDRIPVPRTTLSQCVADDLDLPEQLLPDDKPWFGVAPNTSRSPNFFATPSIFPSDAKSTMVTVRERLTQALAYIEEMQRDKHVLLQVWVPTMSYGQLVLTTRGMPFTLNKSSERLVQFRDVSTRYQLSADVASKGSPVGLPGRVFIGKLPEWSPDVRYFTSYEYPMVAHAQYLDVHGTMGLPVFEKGNPSCLGVIELIMTRQKLNFTSEINNICSA

SEQ ID NO: 906 - protein, 464 aa, Oryza sativa
SNLYIDPEAEVVALSPATLMATNRFVCEICGKGFQRDQNLQLHRRGHNLPWKLKQRGSKEAVRKKVYICPEASCVHHDPSRALGDLTGIKKHFFRKHGEKKWKCDKCSKKYAVHSDWKAHSKICGTREYKCDCGTIFSRRDSFITHRAFCDALTEESAKAIGGIPAAMAAPGHHHHHHQLLFSPPPVMAHHQELAALQEQQQQQHHQDVMQSPHQHQQQQQQRQQLVQQNCGYAVKPEMAPWPTTMPYDHHHPLLQPLCNANAAATAQSSATSAPPTTPQLPAAAAAAHLSATALLQKAAQMGATIGGAGTGAAGAHYAHMASPAGAGAPAGGSATFGLGLSCLNTHQDGGGGGGNGLIPAGMMGHLARTASHGRSGEDVAGAGGGGGDGMTRDFLGLRAFSHRDILLAGFDSSCMGHVNAAAGMAGYEPPPPHHGQPQHQHQQQQQQQQGGSNEPWHGMGSHS

SEQ ID NO: 907 - protein, 205 aa, Eucalyptus globulus subsp. globulus
MVRGKTQMKRIENDTSRQVTFSKRRNGLLKKAFELSVLCDAEVALIIFSPRGKLYEFSSSSLCKTIEKYQTRAKDMEAKTAEISMQPSKGNTLDMEKKIEHFEISRRRLLGEGLDSCSVEELQQTENQLERSLTKIRARKNHLIREHIERLKAEERKLLEEKRKLLQEIECGKGLTPVSSERPREEIRAESMDVETELFIGPPKR

SEQ ID NO: 908 - protein, 496 aa, Brucella melitensis 16M
MATRILIADDDPIQRRNLEAIVMRMGYRTILADGGVSALGFISQRKDIVLVLLDLTMPDMDGLTVLSRMRAAGVAVPVIVLVHSDDMHRVAQAIRLGAADFMIKPLIFERVQVSVANVLKLDALTHEIQRARSSPRVHLSLSEMVAKSPEMERVMVLARRAAALDAPLLVEGETGSGRQTLARAICGGGSRWRGPFVSLDCRGLTMENADDILFGTAKFCPDDPIVSAGKLAERDGGVLFLDEVGALPHHAQLRLFTAMQSGQYESNGSRVTSNARIMTSSSQPLVDFVHMGRFHAGLYHLLGSFSIAMPPLRERVEDISILVHQFAVRFASEERLSHITGIAPHLLERLKAYQWPGNVRELKNAVYRAVLLCDKSELTVEDFAQLNLGAAGFAGAQAMWQKPAAPLSVGRAGTAFSGIDADGEVRTLAAAEEEMIRFAIAHYDGQISEVARRLGIGRTTLYRKLKEYGIDVASISGKGKESDLENESCSWGRAAI

SEQ ID NO: 909 - protein, 259 aa, Triticum aestivum
MGRGRVELKRIENKINRQVTFSKRRNGLLKKAYELSVLCDAEVALIIFSSRGKLYEFGSAGTTKTLERYQHCCYNAQDSNGALSETQSWYQEMSKLKAKFEALQRTQRHLLGEDLGPLSVKELQQLEKQLECSLSLARQRKTQLMMEQVEELRRKERQLGDINRQLKHKLDAEGSNSNNYRAMQQITWAAGTVVDEGAAAYHMQQQQQQHPNHSAAMDCEPTLRIGYPHQFAAPDQAANNIPRSSAPGGENDFMLGWVL

SEQ ID NO: 910 - protein, 165 aa, Glycine max
MAESDNDSGGAQNAGNSGNLSELSPREQDRFLPIANVSRIMKKALPANAKISKDAKETVQECVSEFISFITGEASDKCQREKRKTINGDDLLWAMTTLGFEEYVEPLKIYLQRFREMEGEKTVAARDSSKDSASASSYHQGHVYGSPAYHHQVPGPTYPAPGRPR

SEQ ID NO: 911 - protein, 317 aa, Arabidopsis thaliana
RSNFFDFDAEFEADFQGFKDDSSIDCDDDFDVGDVFADVKPFVFTSTPKPAVSAAAEGSVFGKKVTGLDGDAEKSANRKRKNQYRGIRQRPWGKWAAEIRDPREGARIWLGTFKTAEEAARAYDAAARRIRGSKAKVNFPEENMKANSQKRSVKANLQKPVAKPNPNPSPALVQNSNISFENMCFMEEKHQVSNNNNNQFGMTNSVDAGCNGYQYFSSDQGSNSFDCSEFGWSDQAPITPDISSAVINNNNSALFFEEANPAKKLKSMDFETPYNNTEWDASLDFLNEDAVTTQDNGANPMDLWSIDEIHSMIGGVF

SEQ ID NO: 912 - protein, 245 aa, Eucalyptus globulus
MGRGRVQLKRIENKINRQVTFSKRRCGLLKKAHEISVLCDADVALIVFSTKGKLFEYATDCCMERILERYERYSYAESQVLTNNAETNGNWTLEHAKLKARMEILQKNQKNLMGEELDSLSLKELQNLEHQLDTALKNIRSRKIQLMCESISELQRKDKALQEQNNMLAKKVKEKEKALAQQTQWDNPQDDGLTSSSVILSQSLQPLNIGGPYHPSGIEEGAALGPPQHRNATLFPSWMLSHLQE

SEQ ID NO: 913 - protein, 249 aa, Zea mays
SIHPSIHHHPAAAMCGGAILSGFIPPSGVAAAAAAAKKQQQQQQRCRVTADLLWPGPGSKGAPPKDVQGDRAVKKRGRKNQYRGIRQRPWGKWAAEIRDPNKGVRVWLGTYNTAEEAARAYDAEARKIRGKKAKVNFPDDATGTRHRPTTDEIFNNLKNDDNNNNDDLFAMFAFGDNKKKVPAAKPAAAEGGSGSGSFLVPAPAVAVVPGNKRRSSATNTMLSVSDDQRSNSYGSGSSDLVGSWSWDDD

SEQ ID NO: 914 - protein, 305 aa, Medicago truncatula
MCGGAIIADFIPRRDGRRLTASELWPNSFGQQIDSSNFGFSHTAADQQPPSTLKRSQPPKVNERVEKPLKKQRKNLYRGIRQRPWGKWAAEIRDPRKGVRVWLGTFNTAEEAARAYDKEARKIRGKKAKVNFPNEDDEYTIHATRRYNNNPPPIRPQKLPLYHQQHYQKNLNLEFGYDLNQTDTIHAINTGSGGDENSLFGSGSVSEVGFSVMEFNGGSNQNEFGYFGGVVNEHEKEKEKVVEQETHVVEQAEAELAKNEVQELSDELLAYEDYMKFYQIYYDGQSVMPPNNVQEHVVGDLWSFD

SEQ ID NO: 915 - protein, 124 aa, Gossypium barbadense
IEKVVSSIKAMKPKIVTVVEQEANHNGPVFLDRFTEALHYYSTLFDSLEGSGVAPASQDLAMSELYLGRQICNVVACEGMDRVERHEPLTQWRTRMETAGFSTVHLGSNAYKQASMLLALFASG

SEQ ID NO: 916 - protein, 124 aa, Gossypioides kirkii
IEKVVSSIKAMKPKIVTVVEQEANHNGPVFLDRFTEALHYYSTLFDSLEGSGVAPPSQDLAMSELYLGRQICNVVACEGMDRVERHEPLTQWRTRMETAGFSPVHLGSNAYKQASMLLALFAGG

SEQ ID NO: 917 - protein, 445 aa, Oryza sativa
MSFRSIVRDVRDSFGSLSRRSFEVTLAGLSGLTGHHRGKSQSTVHELCDADLIIQESRWASLPPELLRDVIRRLEASESTWPSRKDVVSCAAVCKAWREMCKEIVLSPEFCGKLTFPLSLKQPGPRDGMIQCFIKRDKSKSTYHLYLCLSTAVLADSGKFLLSAKRHRKTTCTEYVISMDADNISRSSSTYIGKLRSNFLGTKFIIYDTQPSYNGAVIPPVGRSSRRFNSKKVSPKMPSGSYNIAQVTYELNVLGTRGPRRMHCVMHSIPASSVEPGGIVPGQPEQIVPRAFEESFRSTTSFSKSSIMDRSMDFSSSRDFSSARFSDIAGGTINGDEEGQNKERPLVLRNKAPRWHEQLQCWCLNFRGRVTIASVKNFQLIAAPAQPPAGAPTPSQPAPPEQDKIILQFGKVAKDMFTMDYRYPLSAFQAFAICLSSFDTKLACE

SEQ ID NO: 918 - protein, 440 aa, Zea mays
MLHQTTLIPPSVSAASSSPFLHAATTAPAPGGGSCTPAFLRGASAMPSYAHHRSSPLDDGRMDALKCNNSVLPEETTADAAGAFVEKDGFSVEDLLDLEEFAEPDKDVAEREDDDAPPAAAAAAERSKADSQPSSVVKYDLPPLLPPPPEMVDLPSHDVEELEWVSRIMDDSLSELQPQAQPKPAAAVVASSAARPPLAQQRRPFAHDGTYRAVAAAPPQAGPQRTPTICALSTEAMIPVKAKRSKRSRGPGWSRPGASFLPDSASSSSTTTTSSCSSSGSISPFLRLDSSPFGGGLELGEGLFSYGHLLPRPPSKKSKHGGKGSKHRPKKRGRKPKHLPPPHPSAAASASQPGPSDRRCSHCGVQKTPQWRAGPEGAKTLCNACGVRYKSGRLLPEYRPACSPTFVSSIHSNSHRKVLEMRRKKEGGMVATAAPAVASF

SEQ ID NO: 919 - protein, 338 aa, Glycine max
MGRPPCCDKEGVKKGPWTPEEDIILVSYIQEHGPSNWKAVPANTGLSRCSKSCRLRWTNYLRPGIKRGNFTDQEEKMIIHLQALLGNRWAAIAAYLPQRTDNDIKNYWNTYLKKKLNKKLEAGSDQGSLLGGGHNNIGFSSVSQPMSRGQWERRLQTDIHMAKKALSEALSPNKASSSSSTLLAESNSNLSNENSTFYNSNTNKPTTTQSMCYASSADNIARLLKGWMKNTPKSASCAASAVTQNSCSSSEGITTTKGSTTSTSTVELSETFESLFGYESFDNYSSNSEFSPSLSPEATLFQDEGKPDITTGLIDMPFSLLEKWLLDVDAGSQEKLGF

SEQ ID NO: 920 - protein, 325 aa, Capsicum annuum
GTGTALYTAFTSSRISAAQILKAYKAFITACPFKLLSNIFANKYIRKLIAGEPKIHIIDFGILYGFQWPCLIQGLSMRPGGPPELRITGIDLPQPGFKPAERVEETGRRLEKYCKRFKVPFVFKAIAKKWESITVEELEIQRDEVLIVNSLYRLGNIPDETVVQNSPRDAVLDLIRRIRPDMFIHGVLNGTFNTPYFVTRFREALFHYSSLFDMFEASLPREDEDRKLFEEEVFARDAMNVIACEGTERVERPETYKQWQLRCVRAGFKQLPLDQEIVKTVSNKVRSEYHKDFSVHEDGRWMLQGWKGRVFYALSCWKPTRLSAN

SEQ ID NO: 921 - protein, 215 aa, Arabidopsis thaliana
MTEESPEEDHGSPGVAETNPGSPSSKTNNNNNNNKEQDRFLPIANVGRIMKKVLPGNGKISKDAKETVQECVSEFISFVTGEASDKCQREKRKTINGDDIIWAITTLGFEDYVAPLKVYLCKYRDTEGEKVNSPKQQQQRQQQQQIQQQNHHNYQFQEQDQNNNNMSCTSYISHHHPSPFLPVDHQPFPNIAFSPKSLQKQFPQQHDNNIDSIHW

SEQ ID NO: 922 - protein, 202 aa, Glycine max
MVSATVDSDFAFLESVQQYLLGHDSINLMSETHQAASHDPFSDPNKCDGDSGNIAFRSEDATAVVARDHAPPTWKHYRGVRRRPWGKFAAEIRDPKKNGARVWLGTYDTEEKAALAYDKAAFKMRGQKAKLNFPHLIDSDNSDELSEPVMMTTSKRSLLEISSPSSSCSDDSSESQGTKRRKSLAELLNKLAKNRSQVKVEC

SEQ ID NO: 923 - protein, 360 aa, Oryza sativa
MLRKCSYEVTTCGLARVALDILRERKNKFDIVISDVNMPDMDGFKLLEHIGLEMDLPVIMMSIDGETSRVMKGVQHGACDYLLKPVRMKELRNIWQHVYRKKMHEVKEIEGNDSCDDLQILRNSFEGLDEKSLFMRSDSDTMRKRKDVDKDHADQESSDGNTVKKARVVWSVDLHQKFVNAVNQIGFDKVGPKKILDLMNVPGLTRENVASHLQKYRLYLSRLQKQNEERILGAARQDFSHKGTSENLNLRSSFQEQPSNIANGYPHASQNIQTQANMLDSQLEDTKSTVPLPVPDKKRTLASDAADSQNVTSASSLGGVLSFKSMAGESGQEAIRNNDLGMPGLDRRHSIEAVHAVSKA

SEQ ID NO: 924 - protein, 289 aa, Triticum aestivum
MRTREGTTHENVAGYSPPFSAHQSSSSGSTTPDWRGHQRTRTRLLSSAGLFLRTMDDGDIDFTNPETYLHPAMDSYFDDILKGPEHLACTHTHACCNPHVRHDLAHHTQTCVHVHTKILREESDDVPETSESPQENNGPKKRPPGNRAAVRKYREKKKAHTTLLEEEVARLKVLNKQLVRRLQSHSALEAEASRLRCLLVDIRGRIDGELGAFPYKRPVKNKDLADQGSSLGGARQVRLRCNDPPYCSPEMQAMTMDDDDVMSSEVLGQGAGDIANNQWLQGLPDDVKR

SEQ ID NO: 925 - protein, 224 aa, Aristida purpurea var. longiseta
IENKISRQVTFAKRRNGLLKKAYELSLLCDAEVALIIFSGRGRLFEFSSSSCMYKTLERYRSCNYNPQEAKAPQESEINYQEYLKLKTRVEFLQTTQRNILGEDLGPLSMKELVQLENQIEISLKQIRSRKNQMLLDQHYDLKNKEQKLQDLNKDLRKKLQETSGENALHISWEEGGHSGASGNAIEPNQGFLQHPENDSSLQIGYHQQAYMDQLSNEDMGAHH

SEQ ID NO: 926 - protein, 414 aa, Arabidopsis thaliana
MGRHSCCYKQKLRKGLWSPEEDEKLLTHITNHGHGCWSSVPKLAGLQRCGKSCRLRWINYLRPDLKRGAFSPEEENLIVELHAVLGNRWSQIASRLPGRTDNEIKNLWNSSIKKKLKQRGIDPNTHKPISEVESFSDKDKPTTSNNKRSGNDHKSPSSSSATNQDFFLERPSDLSDYFGFQKLNFNSNLGLSVTTDSSLCSMIPPQFSPGNMVGSVLQTPVCVKPSISLPPDNNSSSPISGGDHVKLAAPNWEFQTNNNNTSNFFDNGGFSWSIPNSSTSSSQVKPNHNFEEIKWSEYLNTPFFIGSTVQSQTSQPIYIKSETDYLANVSNMTDPWSQNENLGTTETSDVFSKDLQRMAVSFDFMYSILDDSSERSVFAINLLKNNDERNKSVSVCFRERIVIHSHILHHFSDL

SEQ ID NO: 927 - protein, 307 aa, Oryza sativa (indica cultivar-group)
MAETNHLLLLLLSPPRLRLLSWTPTTPLACAALSRAAKLSRDLVSEKGERGIRSFKKNIAEQHMHKALTTLNSEETIYASYCTLTNSFFASQVRAITYSKASLGLDQLAAIGSLYQFIRGGGEGKEAASQEEEQTPKLRSVIAHLVSRKRRRDRINEKLKALQELLPNCTKTDKVSMLDEAIDYLKSLQLQLQMLVMGKGMAPVVPPELQQYMHYITADPSQIPPIRPSEPRPFQITHATQQRQSNVESDFLSQMQNLHPSEPPQNFLRPPKLQLYTPEQQRRGLASSSGHNSGWITERNSSYNFLE

SEQ ID NO: 928 - protein, 256 aa, Triticum aestivum
  misc_feature (130)..(130): Xaa can be any naturally occurring amino acid
NKFVQKSRLVPVRNSRDIVDPRVRGRKQGKDGASKLPEPPKDFIHGRARRGEATDSHSLAERVRREKISQRMKLLQDLVPGCNKVVGKAVMLDEIINYVQSLQRQVEFLSMKLATVNPQLDFNNLPSLLXPRYAAAVMWAAAAGLVAFPAGCVGRAAPLHGPGERRPSRLRHVRRRRHGRRPRRHAPARPGLLPPHGLPRSSSSTSSATPPPLRLGAFWQDLQSVVQMDMGQSQEIATSSNSYDGSLQTVHMKMEL

SEQ ID NO: 929 - protein, 242 aa, Pinus radiata
MGRGRVELKRIENKINRQVTFSKRRNGLLKKAYELSVLCDAEVALIIFSSRGKLYEFGSAGMLKTLERYQKCSYVLQDATVSDREAQNWHQEVGKLKARVELLQRSQRHLLGEDLGPLSIKELQQLERQLEVALTHVRSRKTQVMLEMMDELRRKERILQEVNKSLRKKLQEAEGQAFNAMQPPPHAWDSHAVANNAYAMQHPSNAVDCEPTLQIGYQYAPPESSMPRHEQAQNNYMQGWMV

SEQ ID NO: 930 - protein, 226 aa, Gossypium raimondii
MRKPCCDKQGTNKGAWSKQEDQKLIDYIRIHGEGCWRSLPKAAGLHRCGKSCRLRWINYLRPDIKRGNFAQDEEDLIIKLHALLGNRWSLIAGRLPGRTDNEVKNYWNSHIKRKLMKMGIDPNNHKLNQYPHHVGPLNPTTTNSMDVACKLRVFSTENDDGVSDAASYLEDETPPTGISNLDLDLTIAFPSSPIKNIIEESQKKTASIVTNNKEEQYTVPTLLLFR

SEQ ID NO: 931 - protein, 555 aa, Arabidopsis thaliana
MANPLLYSPINPQFFQPLLPGFTNHLDIPVAFFLKYLVGTNVGKTAELRSDASEMTWKVKIDGRRLSNGWEDFTIAHDLRVGDIVVFRQEGELVFHVTALGPSCCEIQYGEDTLEEDKIEKLCGTENVSSKKKSLKREAESAPDNSLDSCFVATVTGSNLKRDTLYIPKEFALSNGLMNKYQIVLMNEEGESWKIDLRREAYNYGRFYMRRGWRSFCIANGKKPGDVFAFKLVKNEETPMIQLFPMTIEDLDKLQSLPRHKIRKTEAAPSSPDLSSFVATVTASNLSRDRLYLPKTFIMSNGLLKKFQMCLMNEEGESWTIDVKHEAHTGRFLTIRGWRRFCVANGKKPGDLLKFKLVHNEETPVLQLLPLNSEDLHKLNPSNDTRHGQSLKVTKKEFLGMEATENEFLGEEVYCNDSFKASEKDTLPFAEPINEDIRQGQCSQTIKQEYVSTEEKNSTSQNRFVTLTLTHSSKLNLPFEFMKRNGIKKAGKITMVDRYDAKWRTSLLMDKIGTMSLGRGSKGFCEVNGVEMNESFILELIWEDTVPLLKFCSKV

SEQ ID NO: 932 - protein, 749 aa, Glycine max
MDADSSGEEVLIKTRKPYTITKQRERWTEEEHNRFLEALKLYGRAWQRIEEHIGTKTAVQIRSHAQKFFTKLEKEAFVKGVPIGQALDIDIPPPRPKRKPNNPYPRKTNVGGAPTLHSGARHGKPLISIVSSLGKQALGLEKEPLPEKHDVDLRPSTVKENKDQSCSKVFTILQEAPCSSVSSANKNSTSILVPLRNSCALRKFIPSVKDVITQDETNDSFVTDDLENQKLEIDDGKHTQKSNGTCKVSKSENSGASELVQTEKTDGLNCALTIEGVQGNQNYPRHVPVHVVDGNLGTSTQNPSPDMVFQDSIFQPKGGVNGQPNLVTISATSNISESQNNTARSSIHQSFPPCPTFTQDDYHSFLQVSSTFSSLIVSTLLQNPAAHAAASFAATFWPYANAETSADSPMCTPDFPSRQIGSPPSVTAIAAATVAAATAWWAAHGLLPLCAPLHTAFACPPASAIAVPLMNIDESPQKTEQEEIKPQNSSLQDQILDPEHSEAQHSAPKSPAVFSSKSEERGDANLNTSPKATNHETNQVISENPDSNKMKGRKPVDRSSCGSNTTSSSEETELLLKDEKEKEEPKTPDANILDTELSNRRSRSINNLTDSWKEVSEEGRLAFQALFSREVLPQSFSPTHDLINEDNQIDSIKDNDQNTDYKDEDLESKKCSSNCDGVQKNLLFVKDNNEEEGLLIIGLGPGKLKTRPTGFKPYKRCSVEANENRIGTACNQGEEKGPKRIRLNGEAST

SEQ ID NO: 933 - protein, 209 aa, Gossypium herbaceum
KQEDQKLIDYIRIHGEGCWRSLPKAAGLHRCGKSCRLRWINYLRPDIKRGNFAQDEEDLIIKLHALLGNRWSLIAGRLPGRTDNEVKNYWNSHIKRKLMKMGIDPNNHKLNQYPHHVGPLNPTTTNSMDVARKLRVCSTDNDDGVSDAASYLEDATPPTGISNLDLDLTIAFPSSPIKNIIEESQQKIASIVTNDEEEEYTVPTLLLFR

SEQ ID NO: 934 - protein, 791 aa, Oryza sativa
GDPLYDELWHACAGPLVTVPRVGDLVFYFPQGHIEQVEASMNQVADSQMRLYDLPSKLLCRVLNVELKAEQDTDEVYAQVMLMPEPEQNEMAVEKTTPTSGPVQARPPVRSFCKTLTASDTSTHGGFSVLRRHADECLPPLDMTQSPPTQELVAKDLHSMDWRFRHIFRGQPRRHLLQSGWSVFVSSKRLVAGDAFIFLRGENGELRVGVRRAMRQLSNVPSSVISSQSMHLGVLATAWHAINTKSMFTVYYKPRTSPSEFIIPYDQYMESVKNNYSVGMRFRMRFEGEEAPEQRFTGTIIGSENLDPVWPESSWRSLKVRWDEPSTIPRPDRVSPWKIEPASSPPVNPLPLSRVKRPRPNAPPASPESPILTKEAATKVDTDPAQAQRSQNSTVLQGQEQMTLRSNLTESNDSDVTAHKPMMWSPSPNAAKAHPLTFQQRPPMDNWMQLGRRETDFKDVRSGSQSFGDSPGFFMQNFDEAPNRLTSFKNQFQDQGSARHFSDPYYYVSPQPSLTVESSTQMHTDSKELHFWNGQSTVYGNSRDRPQNFRFEQNSSSWLNQSFARPEQPRVIRPHASIAPVELEKTEGSGFKIFGFKVDTTNAPNNHLSSPMAATHEPMLQTPSSLNQLQPVQTDCIPEVSVSTAGTATENEKSGQQAQQSSKDVQSKTQVASTRSCTKVHKQGVALGRSVDLSKFSNYDELKAELDKMFEFDGELVSSNKNWQIVYTDNEGDMMLVGDDPWEEFCSIVRKIYIYTKEEVQKMNSKSNAPRKDDSSENEKGHLPMPNKSDN

SEQ ID NO: 935 - protein, 145 aa, Arabidopsis thaliana
SSGGDAEKVNDSPAAKSQVVGWPPVCSYRKKNSCKEASTTKVGLGYVKVSMDGVPYLRKMDLGSSQGYDDLAFALDKLFGFRGIGVALKDGDNCEYVTIYEDKDGDWMLAGDVPWGMFLESCKRLRIMKRSDATGFGLQPRGVDE

SEQ ID NO: 936 - protein, 218 aa, Gossypioides kirkii
QGTNKGAWSKQEDQKLIDYIRIHGEGCWRSLPKAAGLHRCGKSCRLRWINYLRPDIKRGNFAQDEEDLIIKLHALLGNRWSLIAGRLPGRTDNEVKNYWNSHIKRKLMKMGIDPNNHKLNQYPHHVVPLNPTTTNSMDVACKLRGCSTDNDDGVSDAASYLEDETPPTGISNLDLDLTIAFPSSPIKNIIKESQQKIASIVTNDEEEQYTAPTLLLFR

SEQ ID NO: 937 - protein, 248 aa, Populus trichocarpa
MGRGRVQLKRIENKINRQVTFSKRRTGLLKKANEISVLCDAEVALIVFSHKGKLFEYSTDDSMEKILERYERYSYAERQLVATDLDSQGNWTLEYNRLKAKVELLQRNHRNYLGEDLDSMSLKELQNLEQQIDTALKHIRARKNHLMSQSISELQRKEKAIQVQNNMLVKQIKEKEKNDKALAQPAFWDLQDHGPNASSFLLSQPAGLPLPCLNIGGSHQEEAPEARRNELGHTLEPIYSFHLGGYGA

SEQ ID NO: 938 - protein, 238 aa, Avena sativa
IENKISRQVTFAKRRNGLLKKAYELSLLCDAEDALIIFSGRGRLFEFSSSSCMYKTLERYRTCNYNSQEAAPLVENEINYREYLKLKTRVEFLQSSQRNILGEDLGPLSMKELDQIESQIDVSLKHIRSRKNQVLLDQLFDLKSKEQELQDQNKDLRKKLQEMSCGENAVHMSWQDGGGQSSSSGQAVDPYPGPLQHPEHDSSMQIGYHQTYMEQLBNEDHTASHHPNAQPGSSAGWI

SEQ ID NO: 939 - protein, 125 aa, Brassica napus
  misc_feature (42)..(42): Xaa can be any naturally occurring amino acid
MGRSPCCDKAGLKKGPWTPEEDQKLLAYIEEHGHGSWRSLPXKAGLQRCGKSCRLRWTNYLRPDIKRGKFTVQEEQTIIQLHALLGNRWSAIATHLAKRTDNEIKNYWNTHLKKRLVKMGIDPVT

SEQ ID NO: 940 - protein, 222 aa, Chasmanthium latifolium
IENKISRQVTFAKRRNGLLKKAYELSLLCDAEVALIIFSGRGRLFEFSSSSCMYKTLERYRSSNYNSQEVKAPLDSEINYQEYLKLRTRVEFLQTTQRNILGEDLGPLSMKELEQLENQIEISLKHIRTRKSQVLLDQLFDLKTKEQELEDISKGLRKKLHETSGENALHISWEEGGHSGASGNAVEPYQGFQQHRENESSLQIGYRQQAYMEQLNNEDMED

SEQ ID NO: 941 - protein, 315 aa, Triticum aestivum
  misc_feature (244)..(244): Xaa can be any naturally occurring amino acid
  misc_feature (250)..(250): Xaa can be any naturally occurring amino acid
  misc_feature (252)..(252): Xaa can be any naturally occurring amino acid
  misc_feature (256)..(256): Xaa can be any naturally occurring amino acid
  misc_feature (258)..(258): Xaa can be any naturally occurring amino acid
  misc_feature (269)..(269): Xaa can be any naturally occurring amino acid
  misc_feature (276)..(277): Xaa can be any naturally occurring amino acid
  misc_feature (284)..(284): Xaa can be any naturally occurring amino acid
  misc_feature (287)..(287): Xaa can be any naturally occurring amino acid
MSFRSIVRDVRDGFGSLSRRSFEVTLASIYGLTGHHKGKTQSSSHVLDDSPSIIRESRWANLPPELIRDIIRRLEADESTWPARKHVVCFAAVCRTWREMCKEIVLSPEFCGKLTFPVSLKQPGPRDGNTMVQCFIKRNKSKSTYHLYLCLSNVVTSESGKFLLSAKRHRKTTCTEYTISMDSGNISRSKRTYIGKIRSNFLGTRFLIYDTQAPYNGAVVPPAGRTNRRFNSTKSLQKLPSVSXTSHKYXYXLNVXGXKGPRRMLASSXSIPASSXXPSGNIAXTAXQIVLNSGGIITFFIVCSSQSTQGTFNKK

SEQ ID NO: 942 - protein, 224 aa, Petunia x hybrida
MEKNNNFTNKYFKHTSMKELNNNNNKVKDSWDNYGSSFEGVDGDLLGGFLWPPRSYTCSFCKREFRSAQALGGHMNVHRRDRARLRLQSPPRENGTHQYSLLNLNLEPNPNVDPNPNPSFISSSPSSPSRKFPPFLSRLPPLISHSFSSTASGSQISHVSHQPKTGDLTKFGSAKFEKIDTFMQGKECNEVLMKRSEFLRLELGIGMINESKEDLDLELRLGYT

SEQ ID NO: 943 - protein, 154 aa, Zea mays
MARPQQRYRGVRQRHWGSWVSEIRHPLLKARIWLGTFETAEDAARAYDEAARIMCGPRARTNFPADANGPPPSFLSAALVDKLHRFNLASVQAAQRQREAAAAAAAAAATSAPATPPTPPATQWGGGGRSLEEQHVEQMIEELLDSDFSMEICC

SEQ ID NO: 944 - protein, 225 aa, Danthonia spicata
IENKISRQVTFAKRRNGLLKKAYELSLLCDAEVALIIFSGRGRLFEFSSSSCMYKTLERYRTCNFNSQEAKAPLDSEINYQEYLKLKTRVEFLQTTQRNILGEDLGPLSSKELEQLENQIEISLKHIRTRKNQALLDQLFDLKSKEQELQDLNKDLRKKLQETSGENAVHISWEEGGHSGASGNAMEPSQGFLQHPENDSDLHMGYHQQAYMDHLNNEDMAAPHH

SEQ ID NO: 945 - protein, 142 aa, Brassica rapa subsp. pekinensis
KNLGVRPGEALAVNFAFVLHHMSDESVSTENHRDRLLRMVKSLSPKVVTLVEQESNTNTAAFFPRFKETMDYYDAMFESIDVTLPRNHKQRINVEQHCLARDVVNIIACEGADRVERHELLGKWRSRFGMAGFTPYPLSPLV

SEQ ID NO: 946 - protein, 225 aa, Ehrharta erecta
IENKISRQVTFAKRRNGLLKKAYELSLLCDAEVALIIFSGRGRLFEFSSSSCMYKTLERYRSCNYNSQEAAPENEINYQEYLKLKTRVEFLRTTQRNILGEDLGPLSMKELEQLENQIVVSLKQIRDKKNQALLDQLFELKSKEQELRDLNKDLRKKLQETTGDNVLHMSWQDGGGQHSGSSGLTAEHHQGLLHHQDQGNHSLQIGYHQAYMDHLNNEAEMAGHN

SEQ ID NO: 947 - protein, 853 aa, Arabidopsis thaliana
MKNPTLFAPKSPHFFQPILPGFKSHIKIPVKFFSKHIEGKHEGNTVYLRSYPSRRTWKVKMEGHKLTEGWKEFVEAHDLRVGDFVVFKHKGDMLFHVTAIGPSCCEVQYAPSRSHDRNEESDEIGESSRNEKIIEENVKTEPDQFSPDLTCFSQSVTASNLTRDLVGIPRDFAKRYGLNIGRHEIVLMDEEGNTWESEVKSYKSGRVFIAGGWTSLCTANKLEVGDSCTFKLLRNPKIPVFRLCSRPKAGAEARPHKRSRVQSSSGGSRQKHDVRQKLDEEGGPSRCTRSSNKATGDQEKLQQTQSCFIFDHVAKNIPVKFFSKYIKGKHEGKTVKLRSDSSKRTWKVKIEGHTLTDGWKEFVEAHDLRISDFVIFKHKGDMFFDVTALGSSCCEVQYAPSCSHGENEESDEIGESSRKEKEIEENIETEPDQFSSDLTCFSQSVTTSNLMRDSVGVPRDFAKRYGFNIGRHEIVLMNEEGKPWESEVISYKSGKVIVAGGWKSLCTESKLEVGDSCTFKLLHNAKMPVFRLCSKLPKAGAEARPLKRARVQRWSQESRSKHDVREKIAEEGEPSRRNRTSNKSTGDQGKLQQTQSCFIFDHVAKVNQSVDNMGKLLRKKHVNKRIPETEAKSFSLYKSCFVAYVTDWNLREDTLVGTSDLLLIPFESREGSNKIVLMNEGARTWTLILKFRDSRRSFYSRGGWRSFCRENGLKPGDSVTFKLESSNTKTPLLLFSIAESKSASTKDRTRFLTLTVTPSSIRSSRLYLSKKFISVNKMERAGGKKITLLDKNGEEWPVTLLMDKRYTRMVLGSGLREFCNAIGVKAYESVVLELVWEETTTLPMFKFCSKIKT

SEQ ID NO: 948 - protein, 229 aa, Eleusine coracana
LENKISRQVTFAKRRNGLLKKAYELSLLCDAEVALIIFSAGRGRLFEFSSSSCMYKTLERYRTCNFNSHEVKAPLDSKINYQDYLKLKTRVEFLQTTQRNILGEDLGPLSNKELEQLEKQIEISLTQIRSRKNQMLLVQLLDLKSKEQELQDLNKDLRKKCQLKKTCGENATHISWEEGGHSGTSRNANEPNQGFLQHAENNYSSLQIGYYQQAYMDQLNNQDIGAAHN

SEQ ID NO: 949 - protein, 219 aa, Oryza sativa
MPDSDNDSGGPSNYAGGELSSPREQDRFLPIANVSRIMKKALPANAKISKDAKETVQECVSEFISFITGEASDKCQREKRKTINGDDLLWAMTTLGFEDYVDPLKHYLHKFREIEGERAAASTTGAGTSAASTTPPQQQHTANAAGGYAGYAAPGAGPGGMMMMMGQPMYGSPPPPPQQQQQQHHHMAMGGRGGFGHHPGGGGGGSSSSSGHGRQDRGA

SEQ ID NO: 950 - protein, 233 aa, Dianthus caryophyllus
MGRGRVELKRIENKINRQVTFAKRRNGLLKKAYELSVLCDAEVALIVFSNRGKLYEFCSTSCMNKTLERYQRCSYGSLETSQPSKETESSYQEYLKLKAKVDVLQRSHRNLLGEDLGELSTKELEQLEHQLDKSLRQIRSIKTQHMLDQLADLQKKEEMLFESNRALKTKLEESCASFRPNWDVRQPGDGFFEPLPLPCNNNLQIGYNEATQDQMNATTSAQNVHGFAQGWML

SEQ ID NO: 951 - protein, 524 aa, Oryza sativa (japonica cultivar-group)
MLPRFHGAMWMQDDGGGDQEHGQAAPPGQEQHHHDQHLMALAAAAAGGAGFGAAQAPAPLLDEDWYFDAAGGGGGGAHGSMMLGLSSVHGGIGAGTSGGGHGQQFSLLNMGAAAAPFDVSGFDLGIACGGVGGGGDVVSFLGGGNASNTALLPVGNAGFLGTFGGFGTAASQMPEFGGLAGFDMFDAGAVNTGGSSSSSSAAAAAASASAHVSNTAPFSGRGKAAVLRPLDIVPPVGAQPTLFQKRALRRNAGEDDDDKKRKAAAGAGAGALSADGADMVLDDGDDDGLSIDASGGLNYDSEDARGGEDSGAKKESNANSTVTGDGKGKKKGMPAKNLMAERRRRKKLNDRLYMLRSVVPKISKMDRASILGDAIEYLKELLQKINDLQNELESSPATSSLPPTPTSFHPLTPTLPTLPSRIKEEICPSALPSPTGQQPRVEVRLREGRAVNIHMFCARRPGLLLSAMRAVEGLGLDVQQAVISCFNGFTLDIFKAEQCKDGPGLLPEEIKAVLMQSAGFHTMI

SEQ ID NO: 952 - protein, 344 aa, Triticum aestivum
SASTRPPLPPAPQLNASTSSTVTGGGYFDLPPSVDSSCSTYALRPIPSPAVAPADLSADSVVRDPKRMRTGGSSTSSSSSSSSLGGGGARSSVVEAAPPVAAAAGAPALPVVVVDTQEAGIRLVHALLACAEAVQQENFSAAEALVKQIPLLAASQGGAMRKVAAYFGEALARRVFRFRPQPDSSLLDAAFADLLHAHFYESCPYLKFAHFTANQAILEAFAGCRRVHVVDFGIKQGMQWPALLQALALRPGGPPSFRLTGVGPPQPDETDALQQVGWKLAQFAHTIRVDFQYRGLVAATLADLEPFMLQPEGEEDPNEEPEVIAVNSVLEMHRLLAQTGALEK

SEQ ID NO: 953 - protein, 811 aa, Oryza sativa (japonica cultivar-group)
MATAEVGGGGGEGDAAAAAVARAGGGGGGGGGGGEDALFTELWSACAGPLVTVPRVGEKVFYFPQGHIEQVEASTNQVGEQRMQLYNLPWKILCEVMNVELKAEPDTDEVYAQLTLLPESKQQEDNGSTEEEVPSAPAAGHVRPRVHSFCKTLTASDTSTHGGFSVLRRHADECLPPLDMSRQPPTQELVAKDLHGVEWRFRHIFRGQPRRHLLQSGWSVFVSAKRLVAGDAFIFLRGENGELRVGVRRAMRQQTNVPSSVISSHSMHLGVLATAWHAVNTGTMFTVYYKPRTSPAEFVVPYDRYMESLKQNYSIGMRFKMRFEGEEAPEQRFTGTIVGMGDSDPAGWPESKWRSLKVRWDEASSIPRPERVSPWQIEPAVSPPPVNPLPVPRTKRLRPNATALPADSSAIAKEAATKVVVESEPNGTQRTFQTQENATPKSGFGNSSELESAQKSIMRPSGFDREKNNTPIQWKLGSDGRMQMSKPESYSEMLSGFQPPKDVQIPQGFCSLPEQITAGHSNFWHTVNAQYQDQQSNHNMFPSSWSFMPPNTRLGLNKQNYSMIQEAGVLSQRPGNTKFGNGVYAALPGRGTEQYSGGWFGHMMPNSHMDDTQPRLIKPKPLVVAHGDVQKAKGASCKLFGIHLDSPAKSEPLKSPSSVVYDGTPQTPGATEWRRPDVTEVEKCSDPSKAMKPLDTPQPDSVPEKPSSQQASRNMSCKSQGVSTRSCKKVHKQGIALGRSVDLTKFNGYEELIAELDDMFDFNGELKGPKKEWMVVYTDNEGDMMLVGDDPWIFAPVQPDGTGYLSCYLAT

SEQ ID NO: 954 - protein, 251 aa, Boechera stricta
MGRGRVELKRIENKINRQVTFAKRRNGLLKKAYELSVLCDAEVSLIVFSNRGKLYEFCSTSNMLKTLERYQKCSYGSIEVNNKPAKELENSYREYLKLKGRYENLQRQQRNLLGEDLGPLNSKELEQLERQLDGSLKQVRCIKTQYMLDQLSDLQGKEHILLEANRALSMKLEDMTIGVRHHHIVGAWEGGDQQNVAYGHHQAQSQGLYQSLECDPTLQIGYGHPVCSEQMTVTTQVQTQPGNGYIPGWML

SEQ ID NO: 955 - protein, 455 aa, Arabidopsis thaliana
MSFRSIVRDVRDSIGSLSRRSFDFKLSSLNKEGGKSRGSVQDSHEEQLVVTIQETPWANLPPELLRDVIKRLEESESVWPARRHVVACASVCRSWRDMCKEIVQSPELSGKITFPVSLKQPGPRDATMQCFIKRDKSNLTYHLYLCLSPALLVENGKFLLSAKRIRRTTYTEYVISMHADTISRSSNTYIGKIRSNFLGTKFIIYDTQPAYNSNIARAVQPVGLSRRFYSKRVSPKVPSGSYKIAQVSYELNVLGTRGPRRMHCAMNSIPASSLAEGGTVPGQPDIIVPRSILDESFRSITSSSSRKITYDYSNDFSSARFSDILGPLSEDQEVVLEEGKERNSPPLVLKNKPPRWHEQLQCWCLNFRGRVTVASVKNFQLIAANQPQPQPQPQPQPQPLTQPQPSGQTDGPDKIILQFGKVGKDMFTMDFRYPLSAFQAFAICLSSFDTKLACE

SEQ ID NO: 956 - protein, 222 aa, Gossypium hirsutum
MEESTVTEQSVGCGGGRKRKELSSEDESSKIVSTTTSANELNDSNGKRMKTPVSKNGNTGSKEAEVEASSADGSKPDKNSKPAEPPKQDYIHVRARRGQATDSHSLAERARRERISERMKILQDLVPGCNKVIGKALVLDEIINYIQSLQQQVEFLSMKLEAVNSRINVNPSFEGFHSKDLGLQPIDGAGMIFGSQTAREYAQGLHPEWLQMHVGGNFKRAT

SEQ ID NO: 957 - protein, 310 aa, Arabidopsis thaliana
MVDENVETNASTLVASVDHGFGSGSGHDHHGLSASVPLLGVNWKKRRMPRQRRSSSSFNLLSFPPPMPPISHVTTPLPARKIDPRKLRFLFQKELKNSDVSSLRRMILPKKAAEAHLPALECKEGIPIRMEDLDGFHVWTFKYRYWPNNNSRMYVLENTGDFVNAHGLQLGDFIMVYQDLYSNNYVIQARKASEEEEVDVINLEEDDVYTNLTRIGNTVVNDLLLQDFNHHNNNNNNNSNSNKCSYYYPVIDDVTTNTESFVYDTTALTSNDTPLDFLGGHTTTTNNYYSKFGTFDGLGSVENISLDDFY

SEQ ID NO: 958 - protein, 374 aa, Arabidopsis thaliana
MGRHSCCYKQKLRKGLWSPEEDEKLLTHITNHGHGCWSSVPKLAGLQRCGKSCRLEQIWYRRLRWINYLRPDLKRGAFSPEEENLIVELHAVLGNRWSQIASRLPGRTDNEIKNLWNSSIKKKLKQRGIDPNTHKPISEVESFSDKDKPTTSNNKRSGNDHKSPSSSSATNQDFFLERPSDLSDYFGFQKLNFNSNLGLSVTTDSSLCSMIPPQFSPGNMVGSVLQTPVCVKPSISLPPDNNSSSPISGGDHVKLAAPNWEFQTNNNNTSNFFDNGGFSWSIPNSSTSSSQVKPNHNFEEIKWSEYLNTPFFIGSTVQSQTSQPIYIKSETDYLANVSNMTDPWSQNENLGTTETSDVFSKDLQRMAVSFGQSL

SEQ ID NO: 959 - protein, 235 aa, Leersia virginica
LENKISRQVTFAKRRNGLLKKAYELSLLCDAEVALIIFSGRSRLFEFSSSSCMYKTLERYRSCNYNSQDAAAPENEINYQEYLKLKTRVEFLQTTQRNILGEDLGPLSMKELEQLENQIEVSLKQIRTRKSQALLDQLFDLKSKEQQLQDLNKDLRKKLQETSAENVLYMSWQDGGGHSGSATVLAADQPHHHQGLLHPHPEGDHSLQIGYHHTHHHHQAYMDHLNNEADMVAHH

SEQ ID NO: 960 - protein, 225 aa, Lithachne humilis
IENKISRQVTFAKRRNGLLKKAYELSLLCDAEVALVIFSGRGRLFEFSSSSCVHKTLERYRSCNYNTQEANAPVENEINYHEYLKLKTRVDFLQTNQRNILGEDLGPLSMKELEQLDNQIETSLKQIRSRKNQVLLDQLFDLKSKEQELQDINKDLRKKLQETNGDQKVVHINSWQDGGQGSSSGHAIEPYQGLIQHPENDPSMQIAYHQVYMDQLNHEDMAAQH

SEQ ID NO: 961 - protein, 185 aa, Brassica oleracea
MGDSDKDSGGGQNGQSPLSPREQDRFLPIANVSRIMKKALPANAKISKDAKETMQECVSEFISFVTGEASDKCQKEKRKTINGDDLLWAMTTLGFEDYVEPLKVYLQRFREIEGERAGVGRPQTGGEGGEHQRDAGVGDGGGFYGGGMQYHQHHQFLHQQNHMYGSTGGGGGDGGGGAGSGRTRT

SEQ ID NO: 962 - protein, 122 aa, Methylococcus capsulatus str. Bath
MTRPCILVVDDEPNGRRMLEILLSRLGCDVLSAGDGKSALKQIGESAIDLIITDINMPELDGLSLLAALKTMGITTPVILVTAYGTDESALTALNQGAFDYLVRPLCLDRVESVIRKALERH

SEQ ID NO: 963 - protein, 186 aa, Arabidopsis thaliana
MVHSKKFRGVRQRQWGSWVSEIRHPLLVWLGTFDTAETAARAYDQAAVLMNGQSAKTNFPVIKSNGSNSLEINSALRSPKSLSELLNAKLRKNCKDQTPYLTCLRLDNDSSHIGVWQKRAGSKTSPNWVKLVELGDKVNARPGGDIETNKMKVRNEDVQEDDQMAMQMIEELLNWTCPGSGSIAQV

SEQ ID NO: 964 - protein, 222 aa, Panicum miliaceum
IENKISRQGTFAKRRNGLLKKAYELSLLCDAEVALIIFSGRGRLFEFSSSSCMYKTLERYRSSNYSSQEVKTPLDGEINYQDYLKLKTRVEFLQTTQRNILGEDLGPLSMKELEQLENQVEISLKHIRTRKNQMLLDHLFDLKSKEQELQDLNKDLRKKLQETNAENVLHVSWEEGGHSGASGNAIEPYQGFLQHPENDPSLQIGYHQQAYMDQLNNEDMAD

SEQ ID NO: 965 - protein, 222 aa, Pennisetum glaucum
IENKISRQVTFAKRRNGLLKKAYELSLLCDAEVALIIFSGRGRLFEFSSSSCMYKTLERYRSSNYGSQEVKTPSDGEINYQDYLELKTRVEFLQTTQRNILGEDLGPLSMKELEQVENQIEISLKHIKDKKNQMLLNQLFDLKSKEQELQDLNKDLRKKLQETNAESVLHLSWEEGGHSGTGGNAIEPYQGFLQHPENDPSLQIGYHQQAYIDQLNNEDMAD

SEQ ID NO: 966 - protein, 247 aa, Momordica charantia
MGRGRVELKRIENKINRQVTFSKRRNGLLKKAYELSVLCDAEVALIIFSSRGKLYEFGSAGTTKTLERYQRCCFSPQDNHIERQTQSWFQEISKLKVKYESLCRTQRHLLGEDLGPLSVKELQNLEKQLEAALAQARQRKTQMMIDQMEALRRKERQLGDLNKELRLKLEAEGQNLKAIQSFWSSSSAAAGHGNDFPLHHSQASPIECQHEQPVLQIGYQNYFSAEGPSVRKSMTTCETNFIQGWVI

SEQ ID NO: 967 - protein, 356 aa, Zea mays
MARRTSGPKKKLRRGLWSPEEDDKLVNHIAKYGHGCWSSVPKLAGLERCGKSCRLRWINYLRPDLKRGAFSQEEEDLIIHLHSMMGNKWSQIASQLPGRTDNEVKNFWNSYVKKKLRQRGIDPATHKPLPLAAEGISSRTAVFSDAELILSSPAAAAGRHMPPPPVAASAAESYVYSYSHSSGGASDGSLQSLSGYNSNSKQTAADHLGAAAAAGYLQQEQDPAAAAAAADALHCGPSGAPAVVLPSVSSSSTLNSMAGLSPAATTTDEQCTNNCSSCSFHSGLEPWLELGSTSGYYGASAAVDHYGAALDELKWSDYVFDGGYGGQPGQGIYGDSKDAVQFVDANALSSSSWCLN

SEQ ID NO: 968 - protein, 222 aa, Setaria italica
IENKISRQVTFAERRNGLLKKAYELSLLCDAEVALIIFSGRGRLFEFSSSSCMYKTLERYRSSNYGSQEIKTPLDGEINYQDYLKLKTRVEFLQTTQRNILGEDLGPLSMKELEQLENQIEIFLKHIRTRKNQMLLDQLFDLKSKEQELQDLNKDLRKKLQETNAESVLHVSWEEGGHSGTSGNAIEPYQGFLQHPDNDPSLQIGYHQQAYMDQLNNEDMGD

SEQ ID NO: 969 - protein, 317 aa, Glycine max
  misc_feature (96)..(96): Xaa can be any naturally occurring amino acid
  misc_feature (112)..(112): Xaa can be any naturally occurring amino acid
MVNVMEWQKQRWQPNGNAEMMYVKVMTDEQLETLRKQIAVYATICEQLIEMHKNISSHQDLAGIRLGNMYCDPLLGSGGHKIASRQRGTPFAMQLXILERIFDQGNWNPARXKIEEITNELHQFGQISETNVYKGVQNRRARSKRKQQNVAPSANVESEVETEVDSKDKKTKPDEFQAPPSVSAGPADNLGFQNHDSSQYLNPESNKPDSVFPSDGTRHFHHVPAFDGLLSNSRNICHTSDSKGFTDQACYTAPPIVGLSAPVRGPPPDGIKLRPPPPPQFSNFFFTYIQSTNDSSSIFISVVFFPQLSHDFGKAFN

SEQ ID NO: 970 - protein, 348 aa, Glycine max
EFGSREISQLSTPFGTSAQRVAAYFSEAISARLVSSCLGIYATLPHTHQSHKVASAFQVFNGISPFVKFSHFTANQAIQEAFEREERVHIIDLDIMQGLQWPGLFHILASRPGGAPYVRLTGLGTSMEALEATGKRLSDFANKLGLPFEFFPVAEKVGNLDPERLNVCKTEAVAVHWLQHSLYDVTGSDTNTLWLLQRLAPKVVTVVEQDLSNTGSFLGRFVEAIHYYSALFDSLGSSYGEESEERHVVEQQLLSREIRNVPAVGGPSRTGEPKFHNWREKLQQCGFRGISLAGNAATQASLLLGMFPSEGYTLVEDNGILKLGWKDLCLLTASAWRPPFHSAITHHN

SEQ ID NO: 971 - protein, 439 aa, Zea mays
  misc_feature (15)..(15): Xaa can be any naturally occurring amino acid
  misc_feature (67)..(67): Xaa can be any naturally occurring amino acid
  misc_feature (126)..(126): Xaa can be any naturally occurring amino acid
  misc_feature (150)..(150): Xaa can be any naturally occurring amino acid
  misc_feature (164)..(164): Xaa can be any naturally occurring amino acid
MCGGAILSGFIPPSXVAAAAAAAAKKKQQQRCRVTADLLWPGPGSKGAPQDKEEDFEADFREFERGXSARMTWNSAGEGGDPEVQELPPPEPTRFAFATAAKAAVDGVMTTTPKDVQGDRAVKKRXRKNQYRGIRQRPWGKWAAEIRDPXRGVRVWLGTYNTAXEEAARAYDAEARKIRGKKAKVNFPDDDATGTRHRPTNAANAARLVAPPPPPKACADEMFNNLKNDDGDNNNNDDLFAMFAFGDNKKEAVPAAKPAAAEGGSGSGSGSFLVPAPAMAAAVPGNKRRSSATNIMVSVSDDQSSNSYGSGSSDLVGSWSWDDAAAAAAMTSDYTSSVFAPASYSYMQGGAPKRMRSSYGGAPPSLAHDAAMPGFGLDKVSYHHYQALPPYYVGSSNASVGNLGLLQQADDAPAPQDGASAGDIWSLDELLMLAAAGAY

SEQ ID NO: 972 - protein, 111 aa, Citrus limon
METSVPYENDLNLKATELRLGLPGSDENEQQTRNNKRSLPDTPDDLDTKDKSDEAASVAKAQVVGWPPIRSYRKNSLQQKKNEGECAGIYVKVSMDGAPYLRKIDLKLYNG

SEQ ID NO: 973 - protein, 204 aa, Lycopersicon esculentum; identical to SEQ ID NO: 128

SEQ ID NO: 974 - protein, 519 aa, Lycopersicon esculentum
MPADPDNSSAMNDSTGSGEASVSSSGNQVVPLKESAKKKRNLPGMPDPDAEVIALSPTTLLATNRFVCEICSKGFQRDQNLQLHRRGHNLPWKLRQRSSNEVKKRVYVCPESSCVHHDPSRALGDLTGIKKHFCRKHGEKKWKCDKCSKKYAVQSDLKAHSKICGTREYKCDCGTLFSRAFCDALAQESAKTLPEKPPSTNEEPKTQAVASSSPPPSPPAPPPATESQPPPPPPAAPKSLMTPTVPPSTAVMSFASSVQNRELRENPVTNSAGAATKQVVEEAAVVASLTGNCSSSCSNGSSSSNVFGSLFASSTASGSLPSQAPVFSDIFRAMAPEHTLEMAPPSSTEPISLGLAMSHSSSIFRPAGQERRQYAPAPQPAMSATALLQKAAQMGAAATSSSFLRGIGVMSSTSSSNGHQEWSGRPSDANGASLAAGLGLGLPCDAGSGLKELMLGTPSVFGPKHPTLDLLGLGMAASVGPSPGLSALLTSMGSNLDMVTSAGSFGSADFSGKDLGRNS

SEQ ID NO: 975 - protein, 435 aa, Oryza sativa
MNRGHISSSELIDAKLEERRISTAKHCPSCGNKLDCKPDWVGLPAGVKFDPTDQELIEHLEAKVREEGSRSHPLIDEFIPTIEGEDGICYTHPEKLPAGVTRDGLSKHFFHRPSKAYTTGTRKRRKIQTECDVQKGETRWHKTGKTRPVMVSGRQKGCKKILVLYTNFGKHRKPEKTNWVMHQYHLGDLEEEKEGELVVCKIFYQTQPRQCSWSSDRGGGAAATASAVTTAAVQQDQQRRRDSGSGSCSSTRDHEVSATSYSTAGYAVAAAVEMQHLKHAADHFSFAPFRKSFEEVGISGDQVHSNQLGRSEQQHAGQEQQPHRPLLATTTAVPATAFLISRPTNPVSNIVPPAMQHASVVLDHDQFHVPAILLHHDKFQQQQQQKLDRRSAGLEELIMGCTSSSTKGEASIPHSQETEWPYQPYWTPDNQDHHG

SEQ ID NO: 976 - protein, 312 aa, Arabidopsis thaliana
MVDENVETKASTLVASVDHGFGSGSGHDHHGLSASVPLLGVNWKKRRMPRQRRSSSSFNLLSFPPPMPPISHVPTPLPARKIDPRKLRFLFQKELKNSDVSSLRRMILPKKAAEAHLPALECKEGIPIRMEDLDGFHVWTFKYRYWPNNNSRMYVLENTGDFVNAHGLQLGDFIMVYQDLYSNNYVIQARKASEEEEVDVINLEEDDVYTNLTRIENTVVNDLLLQDFNHHNNNNNNNSNSNSNKCSYYYPVIDDVTTNTESFVYDTTALTSNDTPLDFLGGHTTTTNNYYSKFGTFDGLGSVENISLDDFY

SEQ ID NO: 977 - protein, 546 aa, Avena sativa
MYRVKSESDCEMMHEDQMDSPLADDGGSSGGSPHRGGGPPLKKGPWTSAEDAILVDYVKKHGEGNWNAVQKNTGLFRCGKSCRLRWANHLRPNLKKGAFTPEEERLIIQLHSKMGNKWARMAANLPGRTDNEIKNYWNTRIKRCQRAGLTIYPASIINQSANEDQQGSSDFNCGENLSNNLLNGNGLYLPDFTCDNFIANSEALSYAPQLSAASISNLLGQSFASKGCGFMDQAGMLKQSDSLLPGLSDTINGALSSVDQFSNDSEKLKQALGFDYLHEANSSSRIIAPFGGALTGSHAYLNGTFSASRSTNGPLKMELPSLQDTESDPNSWLKYTVAPTMQPTELVDPYLHSPAPTPSVKSECASPRNSGLLEELIHEAEALRSGKNQQPSVRSSSSSVSTPCDTTVVSPEFDLCQEYWEEHPSTMLVQEYAPFSGTESTAPASAASPDVFQLSKISPAESHSLGSGEQVMEPSYEPGAGDTPPHPENLRPDAFFSGNTSDSSLFNNAIAMLLGNDLNTECKPVLFDPSSWSNMPHACQMSEEFK

SEQ ID NO: 978 - protein, 169 aa, Gossypium hirsutum
MQEEEEEGVGGDHGFPDDEKKKKGYGRRGAAGGGGGVSPPACQVEKCGLDLSDAKRYHRRHKVCEIHAKAPFVVVAGLRQRFCQQCSRFHELPEFDEAKRSCRRRLAGHNERRRKSSAESSSAAESSNRRGMMISAQLKESHYLADDQRARVNPMAIHGSSSFKRSQIR

SEQ ID NO: 979 - protein, 271 aa, Catharanthus roseus
MDQQASYNLAGDTVPYNLAEIWPFPMNSATAATSFHNNNNAANSLAAAAAAGISMNMNVNLSVNRDHDPMVMDQAPNLNGGVRRRREDDDSAKGVSTSNDANAMNEGDNKRLKTGGSNENHESKAEGEETAKPAEPPKQDYIHVRARRGQATDSHSLAERARREKISERMKILQDLVPGCNKVIGKALVLDEIINYIQSLQRQVEFLSMKLEAVNSRLSPGIEGFPSKEFGQPPYDPSGMAFGSQSSREYGRDTSPEWLHMQIGGGFERTT

SEQ ID NO: 980 - protein, 699 aa, Catharanthus roseus
MTDYRLQPKMNLWGTTTNTAASPIITSDDNSSMMEAFMTSSDPISLWPPSMSVNHHHPPTPTSSAVTTAVDSAKSMPAQPAFFNQENLQQRLQTLIDGARESWTYAIFWQSSVVEFAGPSVLGWGDGYYKGEEDKGKRKNSSSASSFAEQEHRKKVLRELNSLIAGPQGTADDAVDEEVTDTEWFFLISMTQSFVSGSGLPGQALYNSNPVWVTGAGRLAVSHCDRARQAQSFGLQTLVCIPSANGVVELGSTELIFQSSDLMNKVRILFNFNNIDLGSSSGPWPENDPSSLWLTDPSPSGVGVKEGVNTNNNTSVQGNSIPSGNKQQLVFGNNDNHPTTSTLTDHPGAGAVNSYNNSSQNAQQPQGSFFTRELNFSEYGFERSSVKNGNCKPESGEILNFGGESVTKKNSVSGNGNLFSVQSQFGAGEENKNKKRPSPVSRGSNDEGMLSFTSGVVLPSTGVVKSSGGGGGGDSDHSDLEASVVKEAESSRVVDPEKRPRKRGRKPANGREEPLNHVEAERQRREKLNQRFYALRAVVPNVSKMDKASLLGDAISYINELKAKLQTTETDKDELKNQLDSLKKELASKESRLLSSPDQDLKSSNKQSVGNLDMDIDVKIIGREAMIRVQSSKNNHPAARVMGALKDLDLELLHASVSVVNDLMIQQNTVRMGSRFYTQEQLRIALTSRIAGNSMRLLV

SEQ ID NO: 981 - protein, 340 aa, Oryza sativa
  misc_feature (278)..(278): Xaa can be any naturally occurring amino acid
  misc_feature (308)..(308): Xaa can be any naturally occurring amino acid
MYEPKPFSSIVLAHNDPVSHNQQIERINNNVVSNSGGNSSNSNFAARQRLRWTDDLHDRFVDAVTQLGGPDRATPKGILRIMGVQGLTIYHVKSHLQKYRLAKYIPDPTADGAKSDKKDLGDLLADIESSSGMEIGEALKLQMEVQKRLHEQLEVQRQLQLRIEAQGRYLQKIIEEQQRLSGVLGESGKLGALGPAPGEPYQDSNKTDPSTPVPTSESPIRDKAGSGLFKTISSHDDCREPLTPDSSCRAGSSFGEPPQALARASGSPRAIHHRADQXFPPPLKVSEPSSGSDFPQESSVLLSSSAVXFDSLESLDADENVFANGSGSDDCFFICVGAGQ

SEQ ID NO: 982 - protein, 223 aa, Arabidopsis lyrata
MRIRRREEKENQEYKKGLWTVEEDNILMDYVLNHGTGQWNRIVRKTGLKRCGKSCRLRWMNYLSPNVNKGNFTEQEEDLIIRLHKLLGNRWSLIAKRVPGRTDNQVKNYWNTHLSKKLVGDYSSAVKTTGEDDDSLPSLFITAATTSCHHQQENVYENIAKRFDGVVSASYEDKPKQELAQNDVLMATTNDPSHYYGNNALWVHDDDFELSSLFTRNDEFCFW

SEQ ID NO: 983 - protein, 198 aa, Arabidopsis thaliana
  misc_feature (18)..(18): Xaa can be any naturally occurring amino acid
MEKEGLGLEITELRLGLXPGRDVAEKMMKKRAFTEMNMTSSGSNSDQCESGVVSSGGDAEKVNDSPAAKSQVVGWPPVCSYRKKNSCKEASTTKVGLGYVKVSMDGVPYLRKMDLGSSQGYDDLAFALDKLFGFRGIGVALKDGDNCEYVTIYEDKDGDWMLAGDVPWGMFLESCKRLRIMKRSDATGFGLQPRGVDE

SEQ ID NO: 984 - protein, 330 aa, Arabidopsis thaliana
MEARCDFCGTEKALIYCKSDSAKLCLNCDVNVHSANPLSQRHTRSLLCEKCSLQPTAVHCMNENVSLCQGCQWTASNCTGLGHRLQSLNPYSDCPSPSDFGKIWSSTLEPSVTSLVSPFSDTLLQELDDWNGSSTSVVTQTQNLKDYSSFFPMESNLPKVIEEECSGLDLCEGINLDDAPLNFNASNDIIGCSSLDNTKCYEYEDSFKEENNIGLPSLLLPTLSGNVVPNMSLSMSNLTGESNATDYQDCGISPGFLIGDSPWESNVEVSFNPKLRDEAKKRYKQKKSKRMFGKQIRYASRKARADTRKRVKGRFVKSGETFEYDPSLVM

SEQ ID NO: 985 - protein, 846 aa, Lycopersicon esculentum
MAASEVSIQGYSEPSDGSRPVSETGRSSSGVGIVDADTALYTELWRSCAGPLVTVPREGELVYYFPQGHIEQVEASTNQVADQQMPLYNLPSKILCRVVNVLLKAEPDTDEVYAQVTLMPEPNQDENAVKKEPMRPPPPRFHVHSFCKTLTASDTSTHGGFSVLRRHADECLPQLDMSRQPPTQELVAKDLHGNEWRFRHIFRGQPRRHLLQSGWSVFVSSKRLVAGDAFIFLRGENGELRVGVRRAMRQQGNAPSSVISSHSMHLGVLATAWHAIQTKTMFTVYYKPRTSPAEFIVPYDHYMESVKNNYSIGMRFKMRFEGEEAPEQRFTGTIVGIEDADPQRWLESKWRCLKVRWDENSSIPRPDRVSPWKIEPALSPPALNVPPVARPKRPRSSILPTSPDSSVLTREGSSRATADHSQASGFPRVLQGQELSTFRGGFAEINETDLSEKPMIWQTSVNDEKNDIHSASKRYLPDKWLPLGRPESSLTDLLSGFGSSHGFCLPSADQAAFGARLVKQQTQDQEKDFSLLGKPWSLLSSGLSLNLMDSGSKAPGIGGDTPYQMRGDARYSGYGEFSVLPGHRVANQQGSWIMPQPVSPYMQLSSHSREMMHKPSVVKQPEAVKPKEGNYKLFGIPLTSNVCTDAVMMRKSSLIDPASDMNIGIHPHQSLATDSDQRSEQSKGSKVDDGVAANDHDKQFHTFHLAARDKDGKGHSSSTRSCTKVHKQGTALGRSVDLAKFNNYDELIAELDQLFDFNGELKARSKSWLVVYTDDEGDMMLVGDDPWQEFCGMVRKIFIYTKEEVQRMNPGTLNSKGEDTSSVAEGSDAKEVKNLQLPSESGQAES

SEQ ID NO: 986 - protein, 493 aa, Oryza sativa
MAALRQGDDPAIKLFGRTIPLLLDPPAAAAAAADEENSVLENSVLSFLDFLATFGVMPNLGNGVKTNNDLPLVSDKLLIVKGIPFCPNNSKKNDLQGISRPDGRIEIDSMTEDVKTEPDGSVPEKILKKPDKILPCPRCNSMETKFCYFNNYNVHQPRHFCRNCQRYWTAGGAMRNVPVGAGRRRNKHVSKYCQAMMTCNNTVAPGDVSDVVHHQVITHGSSLLPATLKENETPTEFISEVPPCKSSASILDIGEPNDTDLVPLASGDNKEEKSCASSVVVSSCSENLMPDNAIMKEPNNRSGCCNGVALPFPTGPALVLPWSLGWNSVALMPATQCSMQPVLGLKDGIPCPPSWPPQLMVPAPGICTPVVPIPLVPPLWSCFPGWPNGMWNAQCPGGSSSLVLGKHSREESLQEEEKTRNYLWVPKTLRIDDPAEAAKSSIWATLGIKPDDKGIFKSFQPNVAKNGTAPESPQALQANPAAFSRSQSFQETT

SEQ ID NO: 987 - protein, 160 aa, Triticum aestivum
  misc_feature (110)..(110): Xaa can be any naturally occurring amino acid
MDPAKYWMITRRKQGDQKAPAVFSTPHIAVGSGGGTSSATYYESWEERAFAQDSAGSLGGCIWPPRSYSCSFCGREFRSAQALGGHMNVHRRDRARLKLSGMVEDGGGVXVHGMPLHQSYMIQPLPCPPPRPSAPSTEANPNPVRSFLSDPGKSLVDAAT

SEQ ID NO: 988 - protein, 87 aa, Sorghum bicolor
MGRPPCCEKGGVKKGPWTPEEDLVLVSYVQDHGPGNWRAVPTSTGLMRCSKSCRLRWTNYLRPGIKRGNFSDQEEKLIIHLQALLGN

SEQ ID NO: 989 - protein, 212 aa, Zea mays
MSDRGGPASPRSGKHPFYRGIRSRSGKWVSEIREPRKTRRIWLGTFPTAEMAAVAYDVAARALRGPDAALNLPHLAASRPAPASTSADDIRAAAAEAAASLQQPDHQPPAHGSAAGRGIAAAAAGATQQQHQHQQQAGGSSGAAQHEGGGGGAGNPYFLDEEALFETPQYLRNMAAGMMMSPPRFGRNSSDDSPDHPSSSDAGDSLWNYRDP

SEQ ID NO: 990 - protein, 274 aa, Triticum aestivum
AIAEAVKGENFIHIIDFQIAQGSQWVTMIQALAARASGPPYLRITGIDDSDSAYARGGGLDIVGRRLCNIAQSCCLPFEFNAVNAASHEVTLEHLDIRMGEAIAVNFAYQLHHTPDESVCIENHRDRILRMVKSLSPRVVTLVEQEANTNTAPFFSRYMETLDYYTAMFEAIDVACPRDDKVRMSTEQHCVARDIVNLIACEGAERVERHEPFGKWRSRFAMAGFRPYPLSALVNNTIRTLLNDYNSYYKLEEKDGVIYLGWKNRKLVVSSAWR

SEQ ID NO: 991 - protein, 332 aa, Arabidopsis thaliana
MGRPPCCEKIEVKKGPWTPEEDIILVSYIQQHGPGNWRSVPANTGLLRCSKSCRLRWTNYLRPGIKRGNFTQPEEKMIIHLQALLGNRWAAIASYLPQRTDNDIKNYWNTHLKKKLVMMKFQNGIINENKTNLATDISSCNNNNNGCNHNKRTTNKGQWEKKLQTDINMAKQALFQALSLDQPSSLIPPDPDSPKPHHHSTTTYASSTDNISKLLQNWTSSSSSKPNTSSVSNNRSSSPGEGGLFDHHSLFSSNSESGSVDEKLNLMSETSMFKGESKPDIDMEATPTTTTTTTDDQGSLSLIEKWLFDDQGLVQCDDSQEDLIDVSLEELK

SEQ ID NO: 992 - protein, 266 aa, Arabidopsis thaliana
MTADSQSDYAFLESIRRHLLGESEPILSESTASSVTQSCVTGQSIKPVYGRNPSFSKLYPCFTESWGDLPLKENDSEDMLVYGILNDAFHGGWEPSSSSSDEDRSSFPSVKIETPESFAAVDSVPVKKEKTSPVSAAVTAAKGKHYRGVRQRPWGKFAAEIRDPAKNGARVWLGTFETAEDAALAYDRAAFRMRGSRALLNFPLRVNSGEPDPVRIKSKRSSFSSSNENGAPKKRRTVAAGGGMDKGLTVKCEVVEVARGDRLLVL

SEQ ID NO: 993 - protein, 351 aa, Brassica oleracea
MTRRCSHCNHNGHNSRTCPNRGVKLFGVRLTEGSIRKSASMGNLSHYTGSGSGGHGSGSPGDVPDHVAGGDGYASEDFVAGSSSSSRERKKGTPWTEEEHRMFLLGLQKLGKGDWRGISRNYVNTRTPTQVASHAQKYFIRQSNVSRRKRRSSLFDMIPDEGEDVPMDQQEPEAENTPVETLMQSSDSVHQTLAFSSRQAPSILEIDECESMDSTNSTTGEPSSIAAAASSSTSILEETTQPQLQSFPILYPAYFSPYYPFPYPIWPAGYVPEPTKKEETHEILRPTAVHSKAPINVDELLGMSKLSLGESKKKNGESDQSLSLKLGTRQSAFQPNPSSDSSDITNVVHAV

SEQ ID NO: 994 - protein, 1333 aa, Arabidopsis thaliana
MAGDDLVETKKGSSKNSKDSNESKLKQKSPAEFFAENKNIAGFDNPGKSLYTTVRELVENALDSAESISELPEVEVTIEEIVKSKFNSMIGLIDRERVDTQLYDDYETEKARGKRLAKEARASEIQAKNLASGKKNKEPGVSKVLKARGEASYYKVTCKDNGKGMPHDDIPNMFGRVLSGTKYGLKQTRGKFGLGAKMALIWSKMSTGLPIEISSSMKSQNYVTFCRLDIDIHRYPSEYMSSFSKADINLIFYVWAFDIIAMNPSDFPRRIIVFKWLKFSGTFLIFICTKRRATKRNGMGLKYRWLSKETGQHTEYVSKILHYMRQMAVITPYAQFLFRFISETPEKNVTIKFTRRTDVMPPIPIETKHHPSSVDLLLIKRLITDTSKKTLLQFLQNEFVNINKTLAARLIGEMGPDFGPSMAVKSVTSQQMVRIHQLFRQAKFDDPSGDCLSPAGEYNLRLGIIKELHPDMVATYSGSAQVFEGHPFIVEAGVSLGGRDVKQASHILLLFIHVSSSSHRFKGINIFRFANRIPLLFEQGADVVTRTALKRINWNSYKINQTQDKIGVFVSIVSTKIPFKGTGKEYIGDDISEIATAVKSAIQQCCIQLKSKIVKRLQAREQQERKRSLSRYIPDATGAVYEVLKQMTEEHKTKRKRYGEEDIVMLDKVSKQIITKETLKEKLAEHVEQVDYEMALEYATQSGVTMMFNEMGMCGNMDFFSSGSLGEVDFCPVPQAEPDSIVEDDYTDDEIDVDELERRMWRDKMRLKRLKEQDKGKEGVDAAKQRQSQEQARRKKMSRAQDGILKYMLKMMEVCKAQGFVYGIIPENGKPVTGASDNLREWWKDKVRFDRNGPAAITKYQAENNIPGIHEGNNPIGPTPHTLQELQDTTLGSLLSALMQHCDPPQRRFPLEKGVPPPWWPNGKEDWWPQLGLPKDQGPAPYKKPHDLKKAWKVGVLTAVIKHMFPDIAKIRKLVRQSKCLQDKMTAKESATWLAIINQEESLARELYPESCPPLSLSGGSCSLLMNDCSQYDVEGFEKESHYEVEELKPEKVMNSSNFGMVAKMHDFPVKEEVPAGNSEFMRKRKPNRDLNTIMDRTVFTCENLGCAHSEISRGFLDRNSRDNHQLACPHRDSRLPYGAAPSRFHVNEVKPVVGFPQPRPVNSVAQPIDLTGIVPEDGQKMISELMSMYDRNVQSNQTSMVMENQSVSLLQPTVHNHQEHLQFPGNMVEGSFFEDLNIPNRANNNNSSNNQTFFQGNNNNNNVFKFDTADHNNFEAAHNNNNNSSGNRFQLVFDSTPFDMASFDYRDDMSMPGVVGTMDGMQQKQQDVSIWF

SEQ ID NO: 995 - protein, 261 aa, Physcomitrella patens
MVEKVVVSSLRVKRGGNLLAPLKRNVSSIAKKSSTPKSGKPVGSPKVYKGVRMRTWGKWVSEIREPNKRSRIWLGSFPTAEMAAKAYDAAAVCLRGRSVKLNFPDSPPRCAARCNSPREVQAAATAAAVACIPSATALTVANFQSPAQTLESSPLHSSPSSSDMSSGDEDSGEDSVQSFVAEGSQISPSEVVPVLEWVKVEFGDKETVAAGDVDFDCDYSFISEFAADSLLACSYNSKGRTEYLPIETHDAALYDSTLWFF

SEQ ID NO: 996 - protein, 462 aa, Oryza sativa
MSFRSIVRDFRDSFGTLSKRSFEVKISGFSGRHRGKSIGPSSELDDTPVVAQQSKWAGLPPELLRDVMKRLEEDDSNWPSRKDVVACASVCTTWRDMCKDIVRNPEFCGKLTFPVSLKQPGPRDGVIQCFIKRDKSKLTYHLYLCLSSAVLDETGKFLLSAKRSRRTTHTDYIISMDSKNISRSSSGYIGKLRSNFLGTKFIIYDTQPPYNARTLCSQERTSRRFSSRKVSPKVPTGCYPIVQVNYELNVLGTRGPRRMQCAMHSIPASAVEPGGIVPGQPKELLPRLFEESFRSMATSFSKYSITDHSTDFSSSRFSEFGGGALQGQEQEQDGDDVNKERPLVLRNKAPRWHEQLQCWCLNFRGRVTVASVKNFQLIAAAPQPASGAASEPSQAGQAAQQQTQPSQPSSSSSSSSSNHDTVILQFGKVAKDMFTMDYRYPLSAFQAFAICLTSFDTKLACE

SEQ ID NO: 997 - protein, 384 aa, Glycine max
MVPWNRILTITKWKDKTQHLATNNERHKIMIKSPKEADFPLKQEGHSQSITDPEKAKASASSVAQWPRLKDPRIVRVSRAFGGKDRHSKVFTIRGLRDRRVRLSVPTAIQLYDLQDRLGLSQPSKVVDWLLDAAKHEIDELPPLPVVPSVNNFTLGHPSAVTSNEATTSNSQPNEQLLNINRSIQWEGSNQNSTWKLKPKEVSREMISTDKPNWISRSEEDKQGSNNEGPSTRVIPNINLLPRANLNHPSFLGLLNTMPHGYQWEPSAGDVSHQLGNNGFANQTDMHSINVVPFPTSTLSLSTGNSQILLCPPGTAQPYFPSHVTMDMDPRQINHYQMLSSGSQNPLANYLNHSFSLAMMTHKPLHSPNSSKSPSHKDQDFPSN

SEQ ID NO: 998 - protein, 157 aa, Brassica napus
MADSDNDSGGHKDGGGASSREQDRFLPIANVSRIMKKALPANAKISKDAKETVQECVSELISFVTGEASDKCQREKRKTINGDDLLWAMTTLGFEDYVEPLKVYLQKYREVEGERMTPGGRQGDKEGGGGSGGMYGGVVTMGHHHHQRHVYGGSGMN

SEQ ID NO: 999 - protein, 336 aa, Nicotiana tabacum
PRRAAEDCFPPLDYRQQRPSQELVAKDLHGIEWKFRHIYRGQPRRHLLTTGWSAFVNRKKLVSGDAVLFLRTADGELRLGVRRAAQAKTCSNYLAAYSQLLNVSGIVDVVKAISSTNAFSICYNPRASSSGFILPYHKFSKTLAHPFSAGMRFKMRVETEDAAEQRFTGLVVGVSDVDPVRWPGSKWRCLLVRWDDLDVSRHNRVSPWEIEPSGSAPVSSSLVMPSAKRTRVGFPITKADFPIPRDGIAVSDFGESSRFQKVLQGQEILGISSPFVGFDAHSPRTAGIRCFPGFPSSGASRLGNSIRTLLGDTDKSPESIGFSDSSRFNKVLQGQE

SEQ ID NO: 1000 - protein, 336 aa, Nicotiana tabacum
PRRAAEDCFPPLDYRQQRPSQELVAKDLHGIEWKFRHIYRGQPRRHLLTTGWSAFVNKKKLVSGDAVLFLRTADGELRLGVRRAAQAKTCSNYLAAYSQLLNVSGIVDVVNAISSTNAFSICYNPRASSSGFIIPYHKFSKTLAHPFSAGMRFKMRVETEDAAEQRFTGLVVGVSDVDPVRWPGSKWRCLLVRWDDLDVSRHNRVSPWEIEPSGSAPVSSSLVMPSAKRTRVGFPITKADFPIPRDGIAVSDFGESSRFQKVLQGQEILGINSPYGGFDAHSPRTAGIRCFPGFPSSGASRLGNSIRTLLGDTDKSPESIGFSDSSRFNKVLQGQE

SEQ ID NO: 1001 - protein, 264 aa, Nicotiana tabacum
KVLQGQEKAVNAYEENAFRRPHDLRQPPQRKLRWRRGQVRLENQQHNHILDPWLDFIGKEVHGTSPSSNGFSNLQSSKIPSFASESLSIPKIVDYRNSNSKGNVESDVMGSQPTGGSKLKLFGVDILNGPESPSQHGSKLTHFGSFPAASKTVNFLEQSKSTSGNSDTQCSRSCTKVLKYGCALGRSIDMSRVKGYGELISELDKLFGFEGSLLDGSKDWHVTYQDREGNTKLLGDYPWSDSQAMVRKMFICPIGADYLADRSF

SEQ ID NO: 1002 - protein, 642 aa, Zea mays
MMGGGLMMDQSVVFPGVHNFVDLLQQNGDKNLGFASLMPQTSSGDQCVMGEGDLVDPPPDSFPDAVEDDSDDDVEDIEELERRMWRDRMKLKRLRELQQSRGKDPMASGGALADGSSKPRQSQEQARRKKMSRAQDGILKYMLKMMEVCRAQGFVYGIIPEKGKPVSGASDNLRAWWKEKVRFDRNGPAAIAKYQADNAVPGAENELASGAASPHSLQELQDTTLGSLLSALMQHCEPPQRRYPLEKGVPPPWWPTGDEEWWPELGIPKDQGPPPYKKPHDLKKAWKVSVLTAVIKHMSPDIEKIRRLVRQSKCLQDKMTAKEISTWLAVVKQEEELYQKLNPGARPPASTGGIASAISFNTSSSEYDVDIIDECKGDEAGNQRTAVTDPTAFNLGAAILSDKFLVPTPMKEETADVEFIQKRNAPAAAEPELMLNNRLYTCNNVQCPRSDYSYGFLDRNARNSHQYTCKHKDPTPQSTENKPPSAPPQPQAFQPAFSQPNQALNSLDFSLPMDGQRSIAELMNMYDNNFVPNKNPSSDSVAVMERPNAMPQQRIQMDEGFFVQGNGAFDDVNNSMMQQQQQQAPVQQQQQFFIRDDTPFVSQMGDIAASAPEFRFGPGFNMSSGVDYPGAAQRNDGTNWFY

SEQ ID NO: 1003 - protein, 185 aa, Glycine max
MVQTKKFRGVRQRQWGSWVSEIRHPLLKRRVWLGTFETAEAAARAYDQAAILMNGQNAKTNFPTSKNQAEADDNNNTDTFLSPKALSELLSTKLRKYCKDPAPSLTCLRLDADNSHIGVWQKGAGPHSGSNWVMRLELGKKQITEEGSESTESPQSSTNGATENNEVEEEDRVALQMIEELLNWN

SEQ ID NO: 1004 - protein, 252 aa, Arabidopsis thaliana
MDNVKLVKNGVLRLPPGFRFHPTDEELVVQYLKRKVCSSPLPASIIPEFDVCRADPWDLPGNLEKERYFFSTREAKYPNGNRSNRATGSGYWKATGIDKRVVTSRGNQIVGLKKTLVFYKGKPPHGSRTDWIMHEYRLSSSPPSSMGPTQNWVLCRIFLKKRAGNKNDDDDGDSRNLRHNNNNNSSDQIEIITTDQTDDKTKPIFFDFMRKERTTDLNLLPSSPSSDHASSGVTTEIFSSSDEETSSCNSFR

SEQ ID NO: 1005 - protein, 238 aa, Zea mays
MQEASSAAAAGAEPGRRAAQHQFAGVDLRRPKGYAAPAPAPAVGEGDPCPRCASRDTKFCYYNNYNTSQPRHFCKGCRRYWTKGGTLRNVPVGGGTRKKPSSSSSSSSYVAAADADRQPKKKPASKKRRVVAPAPELATAADPGKTATTTTTTSEITTETGALEDSDSLAHLLLQPGTEDAEAVALGLGLSDFPSAGKAVLDDEDSFVWPAASFDMGACWAGAGFADPDPACIFLNLP

SEQ ID NO: 1006 - protein, 307 aa, Oryza sativa
MYQPNPISSSGQTHGNPTAHEQMELGNNAIVPSNGGNNNPNMAARQRLRWTNELHDRFVEAVTQLGGPDRATPKGVLRIMGVPGLTIYHVKSHLQKYRLAKYIPDPSADDNKDEDKDPRNLLSALEGSSGMQISEALKLQMEVQKRLHEQLEVQRQLQLRIEAQGKYLQKIIEEQQRVIGAGASRATSSEQLPDSEKTNPPTPVPISESPVQGAPHSKNSQSQVEPTKSPSHDDALPCGEPLTPDSSCRPGSPTLSPKHERAAKRQRGSDAGDVTAFADGEFVLPPGIFESSTGSEFQECSMPYSGH

SEQ ID NO: 1007 - protein, 246 aa, Cucumis sativus
MAPREKAVAVKPSVGNVKEVHFRGVRKRPWGRYAAEIRDPSKKSRVWLGTFDTAEEAARAYDSAARDFRGVKAKTNFPLPSDDQLLNLNNKINNINNNQSPSQSSTVESSSREQALMVDSSPLNLNLGHGIGGLTNAGPISFPFQRYQIPMIGEVFTRGIPPSNHVLYFDAALRAGMINSHPNQRLHFDRIREAVSDFRREFAGSGVQSDSDSSSVVDMNGQDLKPRGGSGGRLDLDLNFPPPESA

SEQ ID NO: 1008 - protein, 139 aa, Pisum sativum
DSWKEVSEEGRLAFRALFSREVLPQSFSPPPDLINKDHQMGNMKDNEEKAHHKDHLDSKKCSSSCDRLLQNLPFVQNNSEDEGLLTLGLGQGKLKTRRTGFKPYKRCLVEAKETRIGTACNQVEETGPKRIRLEGGSST

SEQ ID NO: 1009 - protein, 68 aa, Pisum sativum
  misc_feature (5)..(6): Xaa can be any naturally occurring amino acid
FTKQXXRWTDEEHKKFLEALKLYGRAWRKIEEHVGTKTAVQIRSHAQKFFSKINRDTNGNDTTLVESI

SEQ ID NO: 1010 - protein, 194 aa, Ananas comosus
GAAASAWWATQGLLPLFPPTPLGFAFPPPPATTGLPIVGDTRTSEKESGDGIYQGPSKDQEAPNLDQSEGLKQYPSSKPSLSSLSDSDESGREEEKRSLCAELKASRTSKSKPSSANEGTNNADSLRNNKKQDRSSCGSNTPSSSDVETDMPENDEQINDNSKQDYFGNSSAGDTNYRRFRSSGSTIRFVERSI

SEQ ID NO: 1011 - protein, 250 aa, Chrysanthemum x morifolium
MGRGRVELKRIENKINRQVTFSKRRNGLLKKAYELSVLCDAEVGLIIFSSRDKLYEFGSVGVMKTLERYQRCCFNPQDNNNERETQSWYQEVSKLKAKFESLQRTQRHLLGEDLGPLSVKELHNLEKQLEGALTQARQRKTQILVEQMEELRCKERELGDMNKHLKIKVSHELSTFETEGQGYRTHQLPCPWNSSNNNTFLMHPSQSNPMGCQQEQPILQIGDNQFMQGEGSSGQRNMVDETNIHGNWVI

SEQ ID NO: 1012 - protein, 108 aa, Betula platyphylla
HKRHKVCEHHPKAQVVLVGGMRQRFCQQCSRFHELSEFDETKRSCRRRLAGHNERRRKNTAESHAEGSSRKGTGTHQLKDIVCGQVDDRGRIQITIHENSTYKHFQIR

SEQ ID NO: 1013 - protein, 516 aa, Arabidopsis thaliana
MMNKDMLLHQHQQPQQDENMSNLTSASGDQASVSSGNITEASGSNYFPHHQQQQEQQQQQRQQLVVPDSQTQKKRRNQPGNPDPESEVIALSPKTLMATNRFVCEICNKGFQRDQNLQLHRRGHNLPWKLKQRSNKEVIRKKVYVCPEASCVHHDPSRALGDLTGIKKHFCRKHGEKKWKCDKCSKKYAVQSDCKAHSKTCGTKEYRCDCGTLFSRRDSFITHRAFCEALAEETAREVVIPQNQNNNQPNPLLIHQSASHPHHHHQTQPTINVSSSSSSSHNHNIINSLHFDTNNGNTNNSNNSNNHLHTFPMKKEQQSNDHIMNYHHSIIPPWLAPQPHALTSSNPNPSNGGGGGGSLFSLASPAMSATALLQKAAQMGSTKTPPLPPTTAYERSTHNNNLTTTMAAMMTSPSGFISSNNNNHVLFQDYNASGFDNHGREEAFDDTFGGFLRTNEVTAAAGSEKSTKSGGGEGLTRDFLGLRPLMSHNEILSFAGLGSCINSSASDQLHPKPWQG

SEQ ID NO: 1014 - protein, 383 aa, Arabidopsis thaliana
  misc_feature (359)..(359): Xaa can be any naturally occurring amino acid
MKNSKCNLIDSKLEEHHHLCGSKHCPGCGRMIQAATKPNWVGLPAGVKFDPTDQELIEHLEAKVKGKEENKKWSSSHPLIDEFIPTIDGEDGICYTHPQKLPGVTRDGLSKHFFHKPSRAYTTGTRKRRKIIQTDHDSELTGSSETRWHKTGKTRPVMINGQQRGCKKILVLYTNFGKNRRPEKTNWVMHQYHLGINEEEREGELVVSKIFYQTQPRQCVSNTNWSDHHGSKDVIGIGVGDEISSVAATLQSLGSGDVVSRVNMHPHTRSFDEGTAEASKGRENQHVSGTCEEVHDGIITSSMSSHHMIHDHHNQHHQIGDRREFHMSSSYPMTPTITSQHESIFHVTSTMPFQRQQLXGSVVWFGIRRPNYGLYHSYVYRRQ

SEQ ID NO: 1015 - protein, 640 aa, Oryza sativa (japonica cultivar-group)
MGGGLVMDQGMMFPGVHNFVDLLQQNGGDKNLGFGALVPQTSSGEQCVMGEGDLVDPPPESFPDAGEDDSDDDVEDIEELERRMWRDRMKLKRLKELQLSRGKDPAGGVVGDPSKPRQSQEQARRKKMSRAQDGILKYMLKMMEVCRAQGFVYGIIPEKGKPVSGASDNLRGWWKEKVRFDRNGPAAIAKYQADNAVPGFESELASGTGSPHSLQELQDTTLGSLLSALMQHCDPPQRRYPLEKGVPPPWWPTGDEEWWPELGIPKDQGPPPYKKPHDLKKAWKVSVLTAVIKHMSPDIEKIRRLVRQSKCLQDKMTAKEISTWLAVVKQEEELYLKLNPGARPPAPTGGITSAISFNASSSEYDVDVVDDCKGDEAGNQKAVVVADPTAFNLGAAMLNDKFLMPASMKEEATDVEFIQKRSASGAEPELMLNNRVYTCHNVQCPHSDYGYGFLDRNARNSHQYTCKYNDPLQQSTENKPSPPAIFPATYNTPNQALNNLDFGLPMDGQRSITELMNMYDNNFVANKNLSNDNATIMERPNAVNPRIQIEEGFFGQGSGIGGSNGGVFEDVNGMMQQPQQTTPAQQQFFIRDDTPFGNQMGDINGASEFRFGSGFNMSGAVEYPGAMQGQQKNDGSNWYY

SEQ ID NO: 1016 - protein, 239 aa, Eriobotrya japonica
MGGGRVQLKRIENKINRQVTFSKRRTGLLKKAHEISVLCDAQVAVVVFSNKGKLFEYATDSCMEQILERYERYSYAERQLVEPEFESQGNWTFEYCRLKAKVEVLQRNHRHYLGEDLDSLTLKEIQNLEQQLDTALKQIRLRKNQLMHESISELQRKRKAIQEENNLLAKKIKEKEKAAAQPQVQDWEQQNIGLDLLPQPLPCLNNGGTQQDEFLQVRRNQLDLTLEPLYSCHLGCFAA

SEQ ID NO: 1017 - protein, 179 aa, Gossypium herbaceum
GAWTAEEDRKLAEVITVHGAKRWKTIPSIAGLNRCGKSCRLRWMNYLRPNIKRGNISDQEEDLILRLHKLLGNRWSLIAGRLPGRTDNEIKNYWNSHLSKKVNQKEKHRGASARQGCKFAQQRLVENAKEQVREENTSTGFGESNISFDVDDFFDFSNVDTRNFEWVNRFLEVDDGFKF

SEQ ID NO: 1018 - protein, 320 aa, Oryza sativa
MMDGRGSQEEEHLDLIMRHHASMGLDRCESEEALGSSESEQPTRPARPRGKRSRAAEVHNLSEKRRRSRINEKMKALQSLIPNSSKTDKASMLDDAIEYLKQLQLQVQMLSMRNGLYLPPVNLSGAPEHLPIPQMSAALDQNSAKASDPSVVLQPVNQTSGALLPFELASQHKPLFLPGVPNATALEPRFLVESSRSNLQSLRFTEPAEMIYPDEMMLKHRLTSASESTIVPGTDEKSVRQNTYMMNADRFDRYALSKDQLQHIMPKNTESVLDMPHLQRILTKVLIVSDYKLTIQLPILDRLQTSDTKVRVEGRIKVNP

SEQ ID NO: 1019 - protein, 407 aa, Lupinus albus
MGEQQQQQTPTTRGMRSTPTTGVGEIVEVQGGHIVRSTGRKDRHSKVCTAKGPRDRRVRLSAHTAIQFYDVQDRLGYDRPSKAVDWLIKKAKTAIDQLAELPAWNPTATIQQQQQQQQQQQINDILRRESHATEDGLIGGSSSRSANAATTIVVSSGGRISEDFHQQQFGEENNNSNKYNSGGSGFLPPSMDTDIADTIKSFFPMVAAAETTTTSFHNYSTPPDLLSRTTSAAANHHNHQQDLRLSLQSFQDPVLLHHHGEEQEHDHGRFHRMVAWNAAIADAANSGHGGGFVFNSPPPSTVAPAAMFGHHGQYFSQRGPLQSSNTPSIRAWIDPNSFAAAATVAAASHPHYHHHYLSPAIHQASVSGFATPSSGFSGFRIPARIQGEEEHDGVSDKPSSASSDSRH

SEQ ID NO: 1020 - protein, 291 aa, Arabidopsis thaliana
MQEAALGMMGATVGGDGDTAVVAEQNRQLKGEIATHPMYEQLLAAHVACLRVATPIDQLPIIEAQLSQSHHLLRSYASTAVGYHHDRHELDNFLAQYVMVLCSFKEQLQQHVRVHAVEAVMACREIENNLHSLTGATLGEGSGATMSEDEDDLPMDFSSDNSGVDFSGGHDMTGFGPLLPTESERSLMERVRQELKLELKQGFKSRIEDVREEIMRKRRAGKLPGDTTTVLKNWWQQHCKWPYPTEDDKAKLVEETGLQLKQINNWFINQRKRNWHNNSHSLTSLKSKRKH

SEQ ID NO: 1021 - protein, 344 aa, Medicago truncatula
MLHCLNTSGNLVGGIISDMTVLERQRARKKFQHEHEQDQQFFMVGCDSALGEVVANSMKPGDLGFENVEETVKKRKADHKVDMKSKDKRIKVSVEEGESKITEQIKGNKNTKLKNRENCDDVGSKENSKGSEIQNHKPDYIHVRARRGQATDSHSLAERVRREKISERMKYLQDLVPGCNKIAGKAGMLDEIINYVQSLQRQVEFLSMKLAAVNPRLDFNIDELFAKEVFTQNFQMMQSEMSNPAYLQFNSAQQQVSCCGGLINNMGILPPEIGVRRNINAPASASLPEIFLDPSCFTHILPSSTWEGDFQNLHSVDFDQGRSTSFPSQPFTGMIEASNLKMEM

SEQ ID NO: 1022 - protein, 920 aa, Arabidopsis thaliana
MADQSLLHSPINPHFFQPILTESRTHLNIPVAFFSKHVEGRNNQNKTVTLRSDASDKTWLVKMDGLKLTDGWEDFAFAHDLRTGDIVVFRLEGEMVFHVTALGPSCCEIQYHTSSHNINDDDRNDQINIASRNSSRVKKNPRKKVESSLDHSRFVAKVSAWCLSNDRLYIPLSFARLNGLNKINSKKIYLQNEEGRSWKLVLRHDKSGMQTFVQSGWRRFCSENGIRQGQYTFKLVRKSAPPVIRLCRAKAKPKQRSVAEYSSDHSCFEGSVTPSSLRNDLLYLPRSFVNSNRLDKRCSEIVLKNEQGVKWPLVLKRFKSVTYLPKGWTSFCQVNRIKAGDSFKFKLVGTWKKPVLSLCPTQSNNHKTPLECSEGNKSEESEEDCLEVKKKKYWSRCRASVENMDDDQTNIGNSSRKKRVSKNPREKVESSSDHSSFVGSVNPSSLYKDQLYLPRNFVSSNFLDKRCSEIVLKNERGEKRTLVLKHFKKDLTFLKKGWTSFCQVNRIKAGDSFKFKLVGTWNKPVLSLCPTETNYHKTPLACSEGNKSEESEEEGTEDKNTSQDCLEVKKRKYWSTCRASAENIDDDQTNIGNSSKEKRVKKNPVKKAESSSDHSSFVANVTASSLNYDRLYLPLSFVSSNGLDKMNGKEIVLLNEEGLSWKFNLKYNQAGKHTYVRPGWSRFCDANGMSQGQQFTFKLVQKHGPPVMYLSLSEHRPKSESSSHRSYFVGSVTASSIKKDKLYLWKSFVSSNGLDKGCKKIILKNKWGREWKLVLKHYKSNCFTIIKRGWTSFCQGNGLKAGDSFKFKLVGTGEKPVLSLCPAESSHEKIPLECPEGIDDVNSLSSNPSSGDDSSRSEESEEENMEDKNISQDCLETKKRKYCSSSSYSQNRFVTLTLTRSAFQTYKLVSFFNNYASRLS

SEQ ID NO: 1023 - protein, 275 aa, Brassica napus
GGAIISDFIPPPSFRRVTSEFLWPDLKKSKGKASKKRSDFFDLDDEFEADFQGFEDDDASFDCEDDDDDVFAKVKPFVFTATTKPLASPPTGSVSGKKIIESGGQAEKSAKRKRKNQYRGIRQRPWGKWAAEIRDPRKGSREWLGTFDTAEEAARAYDAAARRIRGNKAKVNFPEEMVPSVSQKRPSAKKAVAKPNQSPASVQQPTHVSQYCNNSFDNMGHDSSFGDVSFMEEKPQMYNNQFFDVGGNNGYQYFSSDQGSNSLDCSEFGWSDQYP

SEQ ID NO: 1024 - protein, 232 aa, Brassica oleracea
MYGQSEVESDYALLESIRRHLLGGEAELRFAESIPSSCFTESWGDLPLKENDSEDMLVYGLLNDPYDTSSPSSDLSCITEFVDLETSSKRPSDSPVAKAEPAESFAAATVEKQKAATAKGKHYRGVRQRPWGKFAAEIRDPAKNGARVWLGTFETAEDAAFAYDRAAFRMRGSRALLNFPLRVNSGEPDPVRITSKRSYTSSSSSSSENRKLKRRRKTENVPSEFQVKCEVV

SEQ ID NO: 1025 - protein, 430 aa, Glycine max
MSFRSIVREVRDGFGSLSRRSFEVRLPGHNRGKSRSLVHELQDQPPVIQNSRWASLPPELLRDVINRLEASESTWPGRKHVVACAAVCKSWREMCKEIVSSPEFCGKITFPVSLKQPGHRDGPIQCFIKRDKSKLTYHLFLGLSPALLVENGKFLLSAKRTRRTTCTEYVISMDADNISRSSSTYIGKLRSNFLGTKFIIYDTQPPYNNAMLSPPGRSRRFSKKVSPKVPSGSYNIAQVTYELNVLGTRGPRRMNCTMYSIPASSMEPNGVVPGQPELLPRALEDSFRSISFSKSIDNSTEFSSSRFSDIMGTGIEDEEGKVRPLVLKNKSPRWHEQLQCWCLNFRGRVTVASVKNFQLIASTPPAAVAPTGTGPTPSQPTQSSSDPDKIILQFGKVGKDMFTMDYRYPLSAFQAFAICLTSFDTKLACE

SEQ ID NO: 1026 - protein, 185 aa, Zea mays
  misc_feature (177)..(177): Xaa can be any naturally occurring amino acid
MEDGSAPRRSTPPTRRSRSAEFHNFSERRRRDKINEKLKALQELLPNCNKTDKVSMLDEAIDYLKSLQLQLQMLVMGKGMSPVVPLELQQYMHYITADPAQLPPLRPSGQQPRQFQITQANPQRQSNVESDFLSQMQNLHSSEPPQNFLRPPKLQLYTPEQRGGLPSTSHNTGWISXSSSYNFME

SEQ ID NO: 1027 - protein, 349 aa, Lycopersicon esculentum
MGVQEKDPLLQLSLPPGFRFYPTDEELLVQYLCKKVAGHDFPLQIIGEIDLYKFDPWVLPSKATFGEKEWYFFSPRDRKYPNGSRPNRVAGSGYWKATGTDKVITSQGRKVGIKKALVFYVGKAPKGSKTNWIMHEYRLFESSRKNNGSSKLDEWVLCRIYKKNSSGPKPLMSGLHSSNEYSHGSSTSSSSQFDDMLESLPEMDDRFSNLPRLNSLKAEKFNLDRLDSANFDWAILAGLKPMPELGPANQAPGVQGQAQGHVNNHIHSDNNNMNFLNDVYAHPPNFRGNTKVESINLDEEVESGKRNQRIDQSSYFQQSLNGFSQAYTNNVDQFGIQCPNQTLNLGFKQ

SEQ ID NO: 1028 - protein, 306 aa, Brassica napus
  misc_feature (200)..(200): Xaa can be any naturally occurring amino acid
  misc_feature (210)..(211): Xaa can be any naturally occurring amino acid
  misc_feature (222)..(222): Xaa can be any naturally occurring amino acid
  misc_feature (260)..(260): Xaa can be any naturally occurring amino acid
  misc_feature (294)..(294): Xaa can be any naturally occurring amino acid
MASNNNPHENLSDQTPSDDFFDQILGLPNFSASSSDGGLSGGGAPPMMLQLGSGEEGSHMAGLGGSGPSVFHNQMFPLGLSLNQGKGPVFLRPEGGGVHASVNRSSSSSPPTRPVFHGQPMQQPAPAAPHQPTSIRPRVRARRGQATDPHSIAERLRRERIAERIRALQELVPTVNKTDRAAMIDEIVDYVKFLRLQVKXVLSMSRLGGXXAVAPLVTDMPXLSSSVEDETSEGGRTPQLAWEKWSNDGTERQVARLMQXNVGAAMRLLQSKALCMMPISLAMAIYHSQPPDTXSVVKPETNPPPQ

SEQ ID NO: 1029 - protein, 202 aa, Neurospora crassa
MSDSPQSNSKDVEQGAPSPGEEPQMNDPQDPHSSGLNQYEFEVKEQDRWLPIANVARIMKNALPENAKIAKEAKECMQECVSEFISFITSEASEKCQQEKRKTVNGEDILFAMTSLGFENYAEALKIYLSKYREQQNQTNRSENQQNRPSSQGYGAPQGQNQPGQGGFSSNDLGGQQESGDASGYNLYGAQTGHNGGGAEGY

SEQ ID NO: 1030 - protein, 676 aa, Hordeum vulgare subsp. vulgare
MFPLGARQPPPSAMDNHQQQQPPRGEHAAQPRCWEEFLHRKTIRVLLVETDDSTRQVVAALLRHCMYQVIPVENGHQAWAYLQDMQSNIDLVLTEVFMHGGLSGIDLLGRIMNHEVCKDIPVIMMSSHDSMGTVLSCLSNGAADFLAKPIRKNELKNLWAHVWRRSHSSSGSGSGSAIQTQKCTKSKSGDDSNNNSNDRNDDASMGLNARDGSDNGSGTQAQSSWTKRAVEIDSPQDMSPDQSADPPEGTCAHVNHPKSEICSNRWLPGTNNKKCQKPKETTNGDGFKGKELEIGAPGNLNTDDQSSPKESSVKPTDGRCEYLPQNNSSDTVMENLEEPIVRAADLIGSMAKNMDAQQAAARAIDAPNCSLQAPEGKDTDGENAMPYLELSLKRSRSTGEGAGPIQEEQRNVVRRSDLSAFTRYNMCAVSNQGGAGFVGSCSPNGDSSEAAKTVAAQMKQGSNGSSNNNDMGSTTKSVVTKPCGNNKVSPINGNTHTSAFHRVQPWTPATAAGKDKADEVSKKNVAAAAAAAKEMGCEAQSKHPCAAADDVNGGSAGGTAQSSVVNPSGPVEGHAANYGSNSFSNNNTNNGSTAATTAAAATVHAETGGGVDKRSNMMNMKRERRVAAVNKFREKRKERNFGKKVRYQSRKRLAEQRPRVRGQFVRQPPAPAAVER

SEQ ID NO: 1031 - protein, 233 aa, Solanum sogarandinum
MKIQCDVCEKAQATVICCADEAALCAKCDIEVHAANKLASKHQRLHLQCLSNKLPPCDICQDKAAFIFCVEDRALFCKDCDEAIHSASSLAKNHQRFLATGIRVALSSSCNKEAVKNQLEPQPPQQNSQQVGLKMPPQQLSGITSPSWPVDDLLGFPDYESSDKKDLLELGEFEWLGGIDLFGEQTAAEVPELSVPQSSNTNIYKTTKYQMPYKKPRIEISDEDEYFTVPDLG

SEQ ID NO: 1032 - protein, 494 aa, Arabidopsis thaliana
MGLDGNNGGGVWLNGGGGEREENEEGSWGRNQEDGSSQFKPMLEGDWFSSNQPHPQDLQMLQNQPDFRYFGGFPFNPNDNLLLQHSIDSSSSCSPSQAFSLDPSQQNQFLSTNNNKGCLLNVPSSANPFDNAFEFGSESGFLNQIHAPISMGFGSLTQLGNRDLSSVPDFLSARSLLAPESNNNNTMLCGGFTAPLELEGFGSPANGGFVGNRAKVLKPLEVLASSGAQPTLFQKRAAMRQSSGSKMGNSESSGMRRFSDDGDMDETGIEVSGLNYESDEINESGKAAESVQIGGGGKGKKKGMPAKNLMAERRRRKKLNDRLYMLRSVVPKISKMDRASILGDAIDYLKELLQRINDLHNELESTPPGSLPPTSSSFHPLTPTPQTLSCRVKEELCPSSLPSPKGQQARVEVRLREGRAVNIHMFCGRRPGLLLATMKALDNLGLDVQQAVISCFNGFALDVFRAEQCQEGQEILPDQIKAVLFDTAGYAGMI

SEQ ID NO: 1033 - protein, 446 aa, Lycopersicon peruvianum
RMSVDVGAPSPRSIQMDEQVNPGEEYAPKIRKPYTISKQRERWSEEEHKKFLEALKLHGRAWRRIEEHVGTKTAVQIRSHAQKFFSKVVRESSNGDASSVKSIEIPPPRPKRKPMHPYPRKMATPLKSGTLASEKLNRSGSPDLCLSEPENQSPTSVLSTLGSDAFGTVDSTKPSEQSSPVSSAVAENSGDLVLSEPFDFAVEESRSSPARAYATSNPANQACVKLELFPEDNDFVKEGSDEASSTQCLKLFGKTVLVTDAHMPPTDETLTRSSFPAKYLPWDSECRRSSFSIVPPTPSYYFPTPNGSPGPNQSGVATHLPRRSSCAVPCTQVHSPIPMKGRPLFNDRDLEGKETQKEGSSTGSNAESVDAELSGDKNMEIEAQSSRNVVEESVRASVPSLFERRANSTKRVKGFVPYKRCLAERGMSSSTLTGEEREEQRTRLCL

SEQ ID NO: 1034 - protein, 290 aa, Triticum aestivum
NGALLSGDRQQGDTESSHGVDASSKELSKPECSGGAGQDEGPSVSCPKKRKRPSQDRGVKHVQEGSQQLATLAAKREKDDDDKDEPKRPVGTSRKSNGKQTEDKSDAPKEDYIHIRARSGQATNSHSLAERVRREKISERMKFLQDLVPGCSKVIGKAVMLDEIINYVQSLQRQVEFLSMKLSAVNPALDFNIERILSKDLFQSQGTASSTFGFLPDIGHQFLHPPKHSQAALHSIVNPADAFGRVTNAPVGCTFKEATHQVSNNFDGEFHNVIGMPFTLFNDQESNGKP

SEQ ID NO: 1035 - protein, 219 aa, Glycine max
MEAEHHHQTSNAGGIIGGLYVKVMTDDQMELLRQQISVYATICQQLVEMHKAVTIQQDLAGLRLGNLYCDPLMACSGHKITARQRWTPTPLQLQVLERIFDEGNGTPSKQKIKDITIELGQHGQISETNVYNWFQNRRARSKRKQLTPALNVVEPEVETEVEVESPKEKKTRAEGFQVQPYEKSSPHRIKDMYIQSPDIGFDQLMSKIEVAGCYSSYFL

SEQ ID NO: 1036 - protein, 443 aa, Lycopersicon peruvianum
RMSVDVGAPSPRSIQMDEQVNPGEEYAPKIRKPYTISKQRERWSEEEHKKFLEALKLHGRAWRRIEEHVGTKTAVQIRSHAQKFFSKVVRESSNGDASSVKSIEIPPPRPKRKPMHPYPRKMATPLKSGTLALEKLNRSGSPDLCLSEPENQSPTSVLSTLGSDAFGTVDSTKPSEQSSPVSSAVAENSGDLVLSEPSDLVVEESRSSPARAYATSNPANQACVKLELFPEDNDFVKEGSDEASSTQCLKLFGKTVLVTDAHMPPTDETLTRSSFPAKYLPWDSECPRSTFSIVPPTPSYYFPTPNGSAGPNQSGAATHLPWGSSCAVPCTQVHSPIPMKGRPLFNDRDLEGKETQKEGSSTGSNAESVDAEYLEIEAQSSRNVVEESVRVRASVPSLFERRANSTKRVKGFVPYKRCLAERGMSSSTLTGEEREEQRTRLCL

SEQ ID NO: 1037 - protein, 441 aa, Lycopersicon peruvianum
RMSVDVGAPSPRSIQMDEQVNPGEEYAPKIRKPYTISKQRERWSEEEHKKFLEALKLHGRAWRRIEEHVGTKTAVQIRSHAQKFFSKVVRESSNGDASSVKSIEIPPPRPKRKPMHPYPRKMATPLKSGTLALEKLNRSGSPDLCLSEPENQSPTSVLSTLGSDAFGTVDSTKPSEQSSPVSSAVAENSGDLVLSEPFDLVVEESRSSPARAYATSNPANQACVKLELFPEDNDFVKEGSDEASSTQCLKLFGKTVLVTDAHMPPTDETLTRSSFPAKYLPWDSECPRSTFSIVPPTPSYYFPTPNGSPGPNQSGVATHLPWGSSCAVPCTQVHSPIPMKGRPLFNDRDLEGKETQKEGSSTGSNAESVDAEYLEIEAQSSRNVVEESVRASVPSLFERRANSTKRVKGFVPYKRCLAERGVSSSTLTGEEREEQRTRLCL

SEQ ID NO: 1038 - protein, 214 aa, Helianthus annuus
MERGGGFHGYHRLPIHPTSGMQQPDMKQKQPDTTNTTFTEDNECIVREQDRFMPIANVIRIMRKILPPHAKISDDAKETIQECVSEYISFVTGEANDRCQREQRKTITAEDVLWAMSKLGFDDYIEPLTVYLHRYREFDGGERGSIRGEPLVKRAAATADPGPFGMGPFVPGFHMGHHNGFFGPASIAGFFKDPSSAAGQSGPAGFEPYAQCKD

SEQ ID NO: 1039 - protein, 446 aa, Lycopersicon peruvianum
RMSVDVGAPSPRSIQMDEQVNPGEEYAPKIRKPYTISKQRERWSEEEHKKFLEALKLHGRAWRRIEEHVGTKTAVQIRSHAQKFFSKVVRESSNGDASSVKSIEIPPPRPKRKPMHPYPRKMATPLKSGTLASEKLNRSGSPDLCLSEPENQSPTSVLSTLGSDAFGTVDSTKPSEQSSPVSSAVAENSGDLVLSEPFDFVVEESRSSPARAYATSNPANQACVKLELFPEDNDFVKEGSDEASSTQCLKLFGKTVLVTDAHMPPTDETLTRSSFPAKYLPWDSECPRSTFSIVPPTPSYYFPTPNGSAGPNQSGAATHLPWGSSCAVPCTQVHSPIPMKGRPLFNDRDLEGKETQKEGSSTGSNAESVDAELSGEKNMEIEAQSSRNVVEESVRASVPSLFERRANSTKRVKGFVPYKRCLAERGMSSSTLTGEEREEQRTRLCL

SEQ ID NO: 1040 - protein, 446 aa, Lycopersicon peruvianum
RMSVDVGAPSPRSIQMDEQVNPGEEYAPKIRKPYTISKQRERWSEEEHKKFLEALKLHGRAWRRIEEHVGTKTAVQIRSHAQKFFSKVVRESSNGDASSVKSIEIPPPRPKRKPMHPYPRKMATPLKNGTMASEKLNRSGSPDLCLSEPENQSPTSVLSTLGSDAFGTVDSTKPSEQSSPVSSAVAENSGDLVLSEPFDFAVEESRSSPARAYASSNQANQACVKLELFPEDNDFVKEGSDEASSTQCLKLFGKTVLVTDAHMPPTDETLTRSSFPAKYLPWDSECPRSTFSIVPPTPSYYFPTPNGSPGPNQSGVATHLPWGSSCAVPCTQVHSPIPMKGRPLFNDRDMEGKETQKEGSSTGSNAESVDAELSGDKNMEIEAQSSRNVVEESVRASVPSLFERRANSTKRVKGFVPYKRCLAERGMSSSTLTGEEREEQRTRLCL

SEQ ID NO: 1041 - protein, 263 aa, Brassica oleracea
MANFENLSSEFQTIAVDIYSSMNQAADLNNNNNISSNLQFQTFPPFSTSLDSLFLHHRHPQQLHDLPGKYPGSDNNLSATSTLYHSSHNNVDETKKRKALLQPLSSSENSSVSDQLNINTTKTGCSRRGKRLKKKNQEEEKEREVVHVRARRGQATDSHSLAERVRRGKINERLRCLQDIVPGCYKSMGMATMLDEIINYVQSLQNQVELLSMKLTAASSFYDFNSETDAVDSMQRAKAREAVEMGRQTRDGNPVLHLSAWSL

SEQ ID NO: 1042 - protein, 197 aa, Brassica napus
  misc_feature (185)..(185): Xaa can be any naturally occurring amino acid
  misc_feature (191)..(191): Xaa can be any naturally occurring amino acid
  misc_feature (193)..(193): Xaa can be any naturally occurring amino acid
MEKDGLELEITELRLGLPGRDVTEKMMKKRGFTEMIMTSSGSHSEQCESSVVSSGVDVEKVNETPAVKTQVVGWPPVCSYRRKNSCKEVSTTKVGLGYVKVSMDGVPYLRKMDLGSSQGYDDLAFALDKLFGFHGIGVALKDGDNCEYVTIYEDKDGDWMLAGDVPWGMFIESCRRVRIMKRSEXTGFGLXPXGLDE

SEQ ID NO: 1043 - protein, 326 aa, Lycopersicon esculentum
SGNGQSCYNQQQQKNPPQQQTQGFFTRELNFSEFGFDGSSNRNGNSSVSCKPESGEILNFGDSTKKSASSANVNLFTGQSQFWGLGEENNNKNQEKISYFRGSNEEGMLSFVSGTVCFFGHEVRWRRRQDSEHSDLEASVVKEADSSRVVEPEKRPRKRGRKPANGREEPLNHVEAERQRREKLNQRFFSLRAVVPNVSKMDKASLLGDAISYINELKSKLQNTESDKEDLKSQIEDLKKESRRPGPPPPPNQDLKMSSHTGGKIVDVDIDVKIIGWDAMIRIQCNKKNHPAKANGSAHGIRPRRASCQCFSCQRFDDPTSHSENG

SEQ ID NO: 1044 - protein, 299 aa, Zea mays
MGRPPCCDKMGVKKGPWTPEEDLMLVSYVQEHGPGNWRAVPTNTGLMRCSKSCRLRWTNYLRPGIKRGNFTEQEEKLIVHLQALLGNRWAAIASYLPKRTDNDIKNYWNTHLKKKLKNMQGGEGGAGGKRPAVPKGQWERRLQTDIHTARQALRDALSLEPSATPLAKVEPLPTAPGCATYASSADNIARLLEGWLRPGSGKGPEASGSTSTTATTRQRPQCSGEGTASASASHSGGAAANTAAQTPECSTETSKMAGSSVGAGSAPAFSMLERWLLDDGMGHAEVGLMTDVVPLGDPQ

SEQ ID NO: 1045 - protein, 492 aa, Capsella bursa-pastoris
MVLDGNNGGAVWLGGGGEREENEEGSWGRNQEDGSQFKPMLEGDWFSNPPHPQDLQMLQNHQDCRFLGGFPFNPNDNLLLQHSIDSSSSCSPSQAFSLDPSQQNQFLSTNNKSCLINVPSSANPFDNAFEFGSESGFLSQIHAPMSMGFGSLTQLGNRDLSSVPDFLSARSLLAQDHNSSNSVLCGGGGGFTAPLELEGFGSPANGGFVGNRAKVLKPLEVLASSGAQPTLFQKRAAMRQSSRSKMGNSESSGMRRLSDDGDMDETGIGVSGLNYESDEPNESGKAAESVQIGGGKGKKKGMPAKNLMAERRRRKKLNDRLYMLRSVVPKISKMDRASILGDAIDYLKELLQRINDLHNELESTPPGSLPPTSSSFHPLTPTPQTLSCRVKEELCPSSLPSPKGQQARVEVRLREGRAVNIHMFCGRRPGLLLATMKALDNLGLDVQQAVISCFNGFALDVFRAEQCQEGQEILPDQIKAVLFDTAGYAGMI

SEQ ID NO: 1046 - protein, 192 aa, Chara globularis
MGRAKIEIKRIDNATSRQVTFSKRRNGLLKKAYELSVLCDADIAVIMFSPTGKLFEYANSSMKEILDRYHSCPPEQREKRKFDNTDYLSKEAKRLRHEVELAKQENRHLSGEDLNAVQMPELDGLELKLEDALRKIRFRKREVMQMEIDRLQQKVWTSSPQFLLAWRSCHPAVVQIIIFCSHPAFVPKFILQ

SEQ ID NO: 1047 - protein, 244 aa, Oryza sativa
  misc_feature (227)..(227): Xaa can be any naturally occurring amino acid
MGRGRVELKRIENKINRQVTFSKRRNGLLKKAYELSVLCDAEVALIIFSSRGKLYEFGSAGINKTLEKYNSCCYNAQGSNSALAGGEHQSWYQEMSRLKTKLECLQRSQRHMLGEDLGPLSIKELQQLEKQLEYSLSQARQRKTQIMMEQVDDLRRKERQLGELNKQLKNKLEAEADSSNCRSAIQDSWVHGTVVSGGRVLNAQPPPDIDCEPTLQIGYYQFVRPEXRPIQEAMEEEGIRTTTL

SEQ ID NO: 1048 - protein, 336 aa, Coleochaete scutata
MGRGKIEIRRIENATSRQVTFSKRRNGLLKKAYELSVLCDVDIAVIVFSPTGKLFQYASSSMKEILERYEQVPPEQKEKGSQRLDNMDYLNREVAKLRNEVEHKYHEARQLEGEDLDRLGVYELEQLEQKLSNSMRRIRGRKDELMKAELEGLRKQVADMETALVGAASFDGRPLSGSSNYLLQSIPGIRTMPPSSLGGMNPASTSLQLGSDRLFGNRGVELHDRSASDESPVMTNRMSVDFAQAPREMSGVDLSGSPVPPWKSQAAAAAQQEWKNQASSPTDWKVTNTEHLDSWPKAPAPTPEWKSTSVQPEWKNQSSPSSEWKPLDWMYHGPQD

SEQ ID NO: 1049 - protein, 380 aa, Oryza sativa
MARDDDPAKKLAVDGGVAAAARCCDFCGGLPAVVYCRADSARLCLPCDRHVHAANTVSTRHARAPLCSACRAAPAAAFHRGDGFLCSSCDFDERLRRGSIGGGGDELPLDDRAAVEGYTGCPSIGELAAILGVVGGDSDKPADDGWWSASWEEEAPQVLSLDDIIVPTTSCHGLRPLLTPPSPENQSSPDNGELDGEVVRQLGELARSEAAAQATFVAGDQLASWASPEFTSGHGDFGIEAASTTVPSCENETWIMSTDCTDPTDASKTDIAREEAPASSSAEPCLSSLVEISEICRSMSYSGSGIDNGGHDPSTLAIMPTQALPKKGVYDIAYPDRGTVISRYKEKRKNRRFDKQIRYESRKARADGRLRIKGRFAKSN

SEQ ID NO: 1050 - protein, 208 aa, Brassica oleracea
MELFPSQPDLNLNISRRREEQDDKEQEQVERRLVYQSQASDSVRNASGHLIDTVKFTSNYEPTKFYHYQEHNESQDQDSRSILMVSQNQTLGHYYYSPTPPFFFSEVNGQHANPNYSYKLHHGHRRQAQPQPQRCTAKRGVRAPRMRWTTTLHAHFVRAVQLLGGHERATPKSVLELMDVQDLTLAHVKSHLQVIFPISLDCTMYNSI

SEQ ID NO: 1051 - protein, 153 aa, Narcissus pseudonarcissus
MCGGAIISDFIPPSRSRKLTADYLWPNLNKGKDKKKSFGFEDDFEADFNEFEDESEEGESEAVDVKPFKFGAKAGFSREGSTYLKPIELNGAAERSSKRKRKNQYRGIRQRPWGKWAAEIRDPNKGVRVWLGTFNTAEEAARAYDDEARRIRG

SEQ ID NO: 1052 - protein, 216 aa, Phaseolus coccineus
MESGGFHGYRKLPNTTSPGLKLSVSDMNNVNTSRQVAGDNNHTADESNECTVREQDRFMPIANVIRIMRKILPPHAKISGDAKETIQECVSEYISFITGEANERCQREQRKTITAEDVLWAMSKLGFDDYMEPLTMYLHRYRELEGDRTSMRGESLGKRTIEYAPMGVGVATAFVPPQFHPNGYYGPAMGAYVAPPNAASSHHHGMPNTEPNARSM

SEQ ID NO: 1053 - protein, 688 aa, Oryza sativa
MEINSSGEEAVVKVRKPYTITKQRERWTEAEHNRFLEALKLYGRAGQRIEEHVGTKTAVQIRSHAQKFFTKLEKEAINNGTSPGQAHDIDIPPPRPKRKPNSPYPRKSCLSSETSTREVQNDKATISNMTNNSTAQMAGDAALEKLTYIQKLQRKEISEKGSCSEVLNLFREVPSASFSSVNKSSSNHGASSGLEPTKTEVKDVVILERDSISNGAGKDAKDINDQEMERLNGIHISSKPDHSHENCLDTSSQQFKPKSNSVETTYVDWSAAKASHYQMDRNGVTGFQATGTEGSHPDQTSDQMGGASGTMNQCIHPTLPVDPKFDGNTPDPNQENLSESAQGSHAGSPPNMASIVTATVAAASAWWATQGLLPLFPPPIAFPFVPAPSAPFSTADVQRAQEKDIDCPMDNAQKELQETRKQDNFEAMKVIVSSETDESGKGEVSLHTELKISPADKADTKPAAGAETSDVFGNKKKQDRSSCGSNTPSSSDIEADNAPENQEKANDKAKQASCSNSSAGDNNHRRFRSSASTSDSWKEVSEEVVVYQHSAYSHLSYSLNIHHCFSNSHFCCQGRLAFDALFSRERLPQSFSPPQVEGSKEISKEEEDEVTTVTVDLNKNAAIIDQELDTADEPRASFPNELSNLKLKSRRTGFKPYKRCSVEAKENRVPASDEVGTKRIRLESEAST

SEQ ID NO: 1054 - protein, 293 aa, Hordeum vulgare subsp. spontaneum
MSPTLSLKLKKSSHTPQSSVSSSTKLRLFKKEAACQSPSTLPVAMDMGLEVSSSSPSSSSVSSSPEHAARRASPAKRPAGRTKFRETRHPVYRGVRRRRNTERWVCEVRVPGKRGARLWLGTYATAEVAARANDAAMLALGGRSAACLNFADSAWLLAVPSALSDLADVRRAAVEAVADFQRREAADGSLAIAVAKEASSGAPSLSPSSGSDSAGSTGTSEPSANGVFEGPVVMDSEMFRLDLFPEMDLGSYYMSLAEALLMDPPPTATIIHAYEDNGDGGADVRLWSYSVDM

SEQ ID NO: 1055 - protein, 526 aa, Oryza sativa
  misc_feature (267)..(267): Xaa can be any naturally occurring amino acid
  misc_feature (348)..(348): Xaa can be any naturally occurring amino acid
  misc_feature (437)..(437): Xaa can be any naturally occurring amino acid
  misc_feature (455)..(455): Xaa can be any naturally occurring amino acid
  misc_feature (463)..(463): Xaa can be any naturally occurring amino acid
MTKPGGSVAQYCSYKDTATFLLLPPAYCLSLSLYLISCSASSSSSLPQPRSPPTHRARRRRDGRWLRRRPVPKSRAIASRRLAGLRHRSPESVVVFELVPRGAVAAWSEGPVPPRAEGRGPSPPPRATALPCAVPLVVLEPLRRRRPPGLLLLVLLVIDAPIGTASWSLKPSSGLSPIGRRHLFRILSIRIPAAVAVWRNICFARFSCVSISFYYFPERERERERERERERERERVPSISLLRQRARGNSFSPPCRGMEWDKAKASXGEAVDDRGGGEGGLGYVKVMTDEQMEVLRKQISIYATICEQLVEMHRARDAQQDSIAGMRLGNLYCDPLMVPGGHKITSKXQAWTPTPMQLQILENIFDQGNGTPSKQKIKDITAELSQHGQISETNVCGSPGCRNRHEERKQAALPNNNAESEAEADEESPTDKKPKSXRPLHQNIAMRDHNSERIXEMHHFDTXEHEQIRRMMYASNDSSSRSSGSLGQMSFYDNVMSNPRIDHFLGKVESPGSFPHMRSGESFDMY

SEQ ID NO: 1056 - protein, 326 aa, Mangifera indica
MMATASSELSIKSSNETSKSPMEEDKDLNLETALYKELWHACAGPLVTVPRQGERVYYFPQGHIEQVEASTNQFADQQMPIYDLRSKILCRVINVQLKAKPDTDEVFAQITLLPEPNQDENAVEKEPPPPLLPRFHVHSFCKTLTASDTSTHGGFSVLRRHAEECLPVLDMSQQPPTQDLVAKDLHGNEWRFRHIFRGQPRRHLLQSGWSVFVSSKRLVAGDAFIFLRCEKELRVGVRRAMRQQGNVPSSVISSHSMHLGVLATAWHAVSTGTMFTVYYKPRISPAEFIVPFDQYMESVKSNYSIGMRFKMRFEGEEAPEQRLVFG

SEQ ID NO: 1057 - protein, 475 aa, Burkholderia vietnamiensis G4
MADSPPLLTRLAFTMPHALIVEDDPNSLSGLTALLAADGFSVDTATSLAEARTALGRAIPDVVLVDLNLPDGSGFDLLQHLPQQQPNGSLPVIVLTGNATVESAIEGLRHGIWDYLLKPINIPRLRSLLARIPRPYELIDEVQALRASLRRLGRFGALVGRSEAMQHVYDMIEHNARTETAVLFAGEAGTGKKLAARTLHDLSRRRKGPFLSFDCRMIAQANRHGASLDSVLFGHERGAFDGAERRETGLFEQAGGGTLFLDEITALPLVLQEALLHALDSQNFMRIGGTSSIASDFRLIAATRRPAREAVANGTLREDLWLRLDAASITMPPLRERDGDVLAIADALIDELNREARATGRSTTDKRAAPGFVRECLSYEWPGNVRELHERVRFAYDASGDFIETLRAGEASFAAGAALNGSSVQIKVGTPLSDVEDLLIRATLDAVGGTRHRAATLLGISPKTLYNKLQRMKVN

SEQ ID NO: 1058 - protein, 393 aa, Arabidopsis thaliana
MAFHNNHFNHFTDQQQHQPPPPPQQQQQQHFQESAPPNWLLRSDNNFLNLHTAATAAATSSDSPSSAAANQWLSRSSSFLQRGNTANNNNNETSGDVIEDVPGGEESMIGEKKEAERWQNARHKAEILSHPLYEQLLSAHVACLRIATPVDQLPRIDAQLAQSQNVVAKYSTLEAAQGLLAGDDKELDHFMTHYVLLLCSFKEQLQQHVRVHAMEAVMACWEIEQSLQSFTGVSPGEGTGATMSEDEDEQVESDAHLFDGSLDGLGFGPLVPTESERSLMERVRQELKHELKQGYKEKIVDIREEILRKRRAGKLPGDTTSVLKSWWQSHSKWPYPTEEDKARLVQETGLQLKQINNWFINQRKRNWHSNPSSSTVSKNKRRSNAGENSGRDR

SEQ ID NO: 1059 - protein, 456 aa, Zea mays
MSFRSIVRDVRESFGSLSRRSLEVRISGLPGLSGGHHRGKSVGSVSDLRDRPVVVDQSRWVGLPPELLRDVMRRLEEGESNWPSRKNVVACAAVCGTWREICKDIVLSPEFCGKLTFPVSLKQPGPRNGIIQCFIKRDKSTSTYYLYLCLSPVVLSEDGKFLLAAKRNRRTTYTEYIISVDPKSISRSSDGCVGKMRSNFLGTKFIVHDTRAPHNAGSLVSCERGSRRISSRRVSPKVPTASYPIARVNYELNLLGTRGPRRMNCTMHSIPASTLDPQGMVPEPGQPKQIFVPGSSSFEDSFRSANNTPSSSRFSVADRSLDWSSSRFSETSGLAQQDDDDSDQAKERPLVLCNKEPRWHEQLQCWCLNFHGRVTVASVKNFQLIAAPQLDSEPSQQAQQQTQPSNSSSASDHDKVILQFGKVANDMFTMDYRYPLSAFQAFAICLTSFDSKLACE

SEQ ID NO: 1060 - protein, 291 aa, Musa acuminata
MTDHVKWTSVESKTSTNAAPISSSSSSRSPSMASSSGAGTAVEHKRARDIRKHPVYRGVRMRAWGKWVSEIREPRKKSRIWLGTFATPEMAARAHDAAVLSVKGAPAAAAVLNFPELAGSLPRPASLSPRDVREAAARAAAMDMPRANAAALVVEDDELEEIVELPRLGQDLFGSAHLAGEFVFHDSISTASGALSFGASSKCPSCLLLHVLLLPSTAQLTRKERRNSVLLLARNRCKSISCLSPKRLSSRRNSWCSSRGTNSREQTAAIIPRLAFCSSLEDPTIIADAFH

SEQ ID NO: 1061 - protein, 248 aa, Misopates orontium
MGRGKVQLKRIENKINRQVTFSKRRGGLLKKAHEISVLCDAEVALIVFSNKGKLFEYSTDSCMDRILEKYERYSFAERQLVSNEPQSPANWTLEYSKLKARIELLQRNHRHYMGEDLDSMSLKELQSLEQQLDTALKNIRSRKNQLLYDSISDLQRKEKAIQEQNTMLAKKIKEKEKELAQQPQWEHHRHHTNASIMPPPPQYSMAPQFPCINVGNTYEGEGANEDRRNELDLTLDSLYSCHLGCFAA

SEQ ID NO: 1062 - protein, 318 aa, Zea mays
TRGRTRGLPFQFPHTHVSAHSLLQFRQLVIINRTQSSRFHSRMLLNPASETSVLDTIRQHLLEEPAAAEARPADESFGSLVADQWSGSLPFRTDDADDMVVFGVLQDAFAYGWLPDGSFVHVKPEPVRSPDSSSYHPCSYDGSPCFGLLDPEPPLTPGTTTPGRGQEEAAAAMARGKHYRGVRQRPWGKFAAEIRDPARNGARVWLGTYDTAEDAALAYDRAAYRMRGSRALLNFPLRIGSGDKRPSPAPPEPATSSDSSSSASGSHKRRKRGEAAAANMAMALVPPPSQLNRPPQPWFPAAPVEQAAMAPRVEQIVV

SEQ ID NO: 1063 - protein, 558 aa, Zea mays
MADPPTSRMVQHPFGDIPSQTPKQFLYSGSSQHLCHPYQSASDAHVAPQRHYTVRSQSQSQSPDAGSEDFETHSRQYTLDSSSASGCSGHGSPSCQSVHAGSRSPVSHSHDDSHSGSTNGNGSPASASCVTEDPTDLKQKLKDLEAVMLGTDTDPETVDSLEIAIADRLSVEPEEWKNNMVSVPRGDLKELLIACARAVEQNNGYSIDLMVPELRKMVSVSGEPLERLGAYMVEGLVARLAASGSSIYKALRCKEPRSSDLLSYMHFLYEACPYFKFGYMSANGAIAEAVKGEDRIHIIDFHIAQGAQWVSLLQALAARPGGPPFVRVTGIDDPVSAYARGGGLELVGKRLSHIAGLYKVPFQFDAVAISGSEVEEGHLGVVPGEAVAVNFTLELHHIPDETVSTANHRDRVLRLVKGLSPRVLTLVEQESNTNTAPFAQRFAETLDYYAAIFESIDLALPRGDRERINIEQHCLAREIVNLVACEGEERVERHEVFGKWKARLMMAGFKPSPLSALVNATIKTLLQSYSPDYKLAEREGVLYLGWKNRPLIVSSAWH

SEQ ID NO: 1064 - protein, 233 aa, Glycine max
MTGTKRNQITTSPVGSPTSGNISDSSSSKEQDRFLPIANVSRIMKRALPANAKISKEAKETVQECVSEFISFITGEASDKCQREKRKTINGDDLLWAMTTLGFENYVGPLKLYLNNYRETEGEKSSTSMAKQEELHSPTHQHQTNIDGVVVEINKLHHSVAATNKAADFNNTTFSGGGFYSVGPQVAAPKSFTEIGGINGYRESSIAQSAVSGDHDASGNRMMPPNLRYRVEW

SEQ ID NO: 1065 - protein, 443 aa, Lycopersicon chilense
RMSVDVGAPSPRSIQMDEQVNPGEEYAPKIRKPYTISKQRERWSEEEHKKFLEALKLHGRAWRRIEEHVGTKTAVQIRSHAQKFFSKVVRESSNGDASSVKSIEIPPPRPKRKPMHPYPRKMATPLKSGTLASEKLNRSGSPDLCLSEPENQSPTSVLSTLGSDAFGTVDSTKPSEQSSPVSSAVAENSGDLVLSEAFDFAVEESRSSPARAYATSNPANQACVKLELFPEDNDFAKEGSDEASSTQCLKLFGKTVLVTDAHMPPTDETLTRSSFPAKYLPWDSECPQSTFSIVPPTQSYYFPTPNGSPGPNQSGVATHLPWGSSCAVPCTQVHSPIPMKGRPLFNDRDLEGKGTQKEGSSTGSNAESVDAEYLEIEAQSSPNVVEELVRVRASIPSLFERRANSTKRVKGFVPYKRCLAERGVSSSTLTGEEREEQRTRLCL

SEQ ID NO: 1066 - protein, 312 aa, Zea mays
MAKYYWGMLGAATTTTRAGTGSSLIRSTWPPPAAHGGGRSGEPSWEELAFAQDAAGQLGGCVWPPRSYTCTFCRREFRSAQALGGHMNVHRRDRARLRLGGSSSPEDVHATTNDQPHPQQGALLYRAAASNPSTTTPSTTAAAGTTAAGPAAAITIAGAGDGDANTTTTTTYLSRIIKESKNKRFMPMPDHSVAGMREDQAAAIDDHRHNEDGDSWRSASAAKKRRRLDHPLATAAALLIFVQPAPKAATNVAACESQGGADHETKVPHTTTLTSPSSSSPLLLDQRHEVDLELRLGTTPKVTYIHGNDTRS

SEQ ID NO: 1067 - protein, 241 aa, Cucurbita maxima
MERRMWRDKMRLKRLKEQSKVKEGIDIVKQRQSQDQARRKKMSRAHDGILKYMLKIMEVCNAQGFVYGIIPEKGKPVTGASDNLREWWKDKVRFDRNGPAAIAKYQADNAIPGRNDGCNSIGPTPHTLQELQDTTLGSLLSALMQHCDPPQRRFPLEKGVPPPWWPTGVEEWWPQLGLPKDQGPPPYKKPHDLKKAWKVGVLTAVIKHMSPDIAKIRKLVRQSKCLQDKMTAKESATWLAI

SEQ ID NO: 1068 - protein, 241 aa, Cucurbita moschata
MERRMWRDKMRLKRLKEQSKVKEGIDIAKQRQSQDQARRKKMSRAHDGILKYMLKIMEVCNAQGFVYGIIPEKGKPVTGASDNLREWWKDKVRFDRNGPAAIAKYQADNAIPGRNDGCNSIGPTPHTLQELQDTTLGSLLSALMQHCDPPQRRFPLEKGVPPPWWPTGIEEWWPQLGLSKDQGPPPYKKPHDLKKAWKVGVLTAVIKHMSPDIAKIRKLVRQSKCLQDKMTAKESATWLAI

SEQ ID NO: 1069 - protein, 379 aa, Arabidopsis thaliana
MCGGAIISDFIPPPRSLRVTNEFIWPDLKNKVKASKKRSNKRSDFFDLDDDFEADFQGFKDDSAFDCEDDDDVFVNVKPFVFTATTKPVASAFVSTGIYLVGSAYAKKTVESAEQAEKSSKRKRKNQYRGIRQRPWGKWAAEIRDPRKGSREWLGTFDTAEEAARAYDAAARRIRGTKAKVNFPEEKNPSVVSQKRPSAKTNNLQKSVAKPNKSVTLVQQPTHLSQQYCNNSFDNSFGDMSFMEEKPQMYNNQFGLTNSFDAGGNNGYQYFSSDQGSNSFDCSEFGWSDHGPKTPEISSMLVNNNEASFVEETNAAKKLKPNSDESDDLMAYLDNALWDTPLEVEAMLGADAGAVTQEEENPVELWSLDEINFMLEGDF

SEQ ID NO: 1070 - protein, 616 aa, Glycine max
MMMFEDMGFCGDLDMLCGSLGDGDIAVRQTEPDPVVEDDYSDEEIDVDELEKRMWRDKMRLKRLKEQTKSKEGTDAAKQRQSQEQARRKKMSRAQDGILKYMLKMMEVCKAQGFVYGIIPEKGKPVTGASDNLREWWKDKVRFDRNGPAAIAKYQADNAIPGKNDGCNSIGPTPHTLQELQDTTLGSLLSALMQHCDPPQRRFPLEKGVPPPWWPTGNEEWWPQIGLPKDQGPPPYKKPHDLKKAWKVGVLTAVIKHMSPDIAKIRKLVRQSKCLQDKMTAKESATWLAIINQEEALARELYPDYCPPFSSAVANGSMVINDCSEYDVDGAEEEPNFDVEDRKPDHLHPSNLGMERMMGRMPIQQPSHPMKGDVVTNLDFIRKRKISSDFNMMMDQKIYTCEHPQCPYSEVRLGFHDRSARDNHQLNCAYRNSSADYGGGPNFHATEVKPVIFPQSFVQPNTTAQSASLVAPSFDLTGLGVPEDGQKMISDLMTIYDTNVVGNKNLSSTNCVTAENHNLSQASLQRQDSFFPGQGMVLEGNLFAREEGQFDRFKATMNMNMNMNMNTPFDTNHNNNNIHLMFNSPCDLSSFDFKEDIQGVGMDSLQKQQEVSIWYQ

SEQ ID NO: 1071 - protein, 443 aa, Lycopersicon chilense
RMSVDVGAPSPRSIQMDEQLNPGEEYAPKIRKPYTISKQRERWSEEEHKKFLEALKLHGRAWRRIEEHVGTKTAVQIRSHAQKFFSKVVRESSNGDASSVKSIEIPPPRPKRKPMHPYPRKMATPLKSGTLASEKLNRSGSPDLCLSEPENQSPTSVLSTLGSDAFGTVDSTKPSEQSSPVSSAVAENSGDLVLSEAFDFAVEESRSSPARAYATSNPANQACVKLELFPEDNDFAKEGSDEASSTQCLKLFGKTVLVTDAHMPPTDETLTRSSFPAKYLPWDSECPQSTFSIVPPTPSYYFPTPNGSPGPNQSGVATHLPWGSSCAVPCTQVHSPIPMKGRPLFNDRDLEGKGTQKEGSSTGSNAESVDAEYLEIEAQSSPNVVEELVRVRASIPSLFERRANSTKRVKGFVPYKRCLAERGVSSSTLTGEEREEQRTRLCL

SEQ ID NO: 1072 - protein, 252 aa, Arabidopsis thaliana
MGRGRVEMKRIENKINRQVTFSKRRNGLLKKAYELSVLCDAEVALIIFSSRGKLYEFGSVGIESTIERYNRCYNCSLSNNKPEETTQSWCQEVTKLKSKYESLVRTNRNLLGEDLGEMGVKELQALERQLEAALTATRQRKTQVMMEEMEDLRKKERQLGDINKQLKIKFETEGHAFKTFQDLWANSAASVAGDPNNSEFPVEPSHPNVLDCNTEPFLQIGFQQHYYVQGEGSSVSKSNVAGETNFVQGWVL

SEQ ID NO: 1073 - protein, 225 aa, Arabidopsis thaliana
GQSIKPVYGRNPSFSKLYPCFTESWGDLPLKENDSEDMLVYGILNDAFHGGWEPSSSSSDEDRSSFPSVKIETPESFAAVDSVPVKKEKTSPVSAAVTAAKGKHYRGVRQRPWGKFAAEIRDPAKNGARVWLGTFETAEDAALAYDRAAFRMRGSRALLNFPLRVNSGEPDPVRIKSKRSSFSSSNENGAPKKRRTVAAGGGMDKGLTVKCEVVEVARGDRLLVL

SEQ ID NO: 1074 - protein, 474 aa, Triticum aestivum
LWSRPPAHIGQQVYHQNHVEMAPQHGAGAGGSQHMTQHSIGGAGGGGSQHMVQHSAGGGGGSQHMAQHSGGGGGSQHMAQHNTGAGGGADGGMDIGMGVVAVSGDAKGDQGGEAGQDEQVKKKRGRPRKYKPDGSVTLGLSPSPSTPHSSSPGMGAMVTTPGSGFGPGTGSGGSGSGALTEKRGRGRPPGSGKMQQLASLGKWFLGSVGTGFTPHVIIISAGEDVAARIMSFSQQGPRAICIISATGAVSTATLHQDSDSGAVTYEGRFEILCLSGSYLVVEEGGTRTRSGGLCIALCGPDHRVIGGSVSGVLTAAGTVQVIVGSFMYGGGSKKNKGKADQDVENEEQNGGGGGEETPTLALPEHPHNMLPHPMSGWPPGLMNQMDPRASPMYGSSSKQQNKTKAEQEMEDEERNGGGGGGGEEPLTMAHPEDNMNPEHNMNMPPPHPMGGWQPGLMRQMDSRSSSIDINSIRE

SEQ ID NO: 1075 - protein, 379 aa, Arabidopsis thaliana
MCGGAIISDFIPPPRSLRVTNEFIWPDLKNKVKASKKRSNKRSDFFDLDDDFEADFQGFKDDSAFDCEDDDDVFVNVKPFVFTATTKPVASAFVSTGIYLVGSAYAKKTVESAEQAEKSSKRKRKNQYRGIRQRPWGKWAAEIRDPRKGSREWLGTFDTAEEAARAYDAAARRIRGTKAKVNFPEEKNPSVVSQKRPSAKTNNLQKSVAKPNKSVTLVQQPTHLSQQYCNNSFDNSFGDMSFMEEKPQMYNNQFGLTNSFDAGGNNGYQYFSSDQGSNSFDCSEFGWSDHGPKTPEISSMLVNNNEASFVEETNAAKKLKPNSDESDDLMAYLDNALWDTPLEVKAMLGADAGAVTQEEENPVELWSLDEINFMLEGDF

SEQ ID NO: 1076 - protein, 433 aa, Picea mariana
MEHLNTAAAQASSSLYGVGMAEYGDAGVSSMMALITQHEPHDSESIMSTRMPSSFSSFHGHADCLLSAAMFQASQGDHKLKRQPGMDQLVSEQAVMSDSSMPSVKTEVCSGLRNQFEFHREQTGNCYTDQSPNTPVNPLVTSLASQARGEAQMIPSLDANSPHFNVDNEEYAIKSKILAHPQYPSLLGAYIDCQKIGAPPEAVARLDALTHEYQNQQRRTVSIGMDPELDQFMEAYCEILTKYHEELAKPFKEAMTFLMKIEAQFNSLGKGTIRISPPAENDEKTEGGGSSEEVEDGSGGETDFQEVDHHAVEDRELKDHLLRRYSGYLSSLKQEFMKKKKKGKLPKDARQKLLDWWSLHDKWPYPSETEKIALAECTGLDQKQINNWFINQRKRHWKPSEDMHFMVMNSHSPHSAALYVERHLMTEGYHLDC

SEQ ID NO: 1077 - protein, 241 aa, Citrullus lanatus
MERRMWRDKMRLKRLKEQSKVKEGIDIVKQRQSQDQARRKKMSRAHDGILKYMLKIMEVCNAQGFVYGIIPEKGKPVTGASDNPREWWKDKVRFDRNEPAAIAKYQADNAIPGRNDGCNSIGPTPHTLQEPQDTTLGSLLSALMQHCDPPQRRFPLEKGVPPPWWPTGVEEWWPQLGLPKDQGPPPYKKPHDLKKAWKVGVLTAVIKHMSPDIAKIRKLVRQSKCLQDKMTAKESATWLAI

SEQ ID NO: 1078 - protein, 442 aa, Picea mariana
MKKLFHSDMEHLNAAAAQASSSLYGVSMAEYGDVGVSSMMALMTQHEPHERDSILTTSMPSSFSSFHGHAECLLSAAMFQASQGDHKLKRQPEMDQLVSEQAVMSDSSMPSVKTEGCSSLRNQFEIRREQTGNCYTDQSSNAPVSPLVTSLVPQAGGEARMITSLEADSSHFSGGNEAEAIKAKILAHPQYPSLLGAYIDCQKIGAPPEVVARLDALTHEYENQQHRTTVSIGMDPELDQFMEAYCEMLTKYHEELTKPFKEAMSFLKKIEAQLNSLSKGTIRISPSAENDEKTEGGASSEEVEDGSGGETDFQEVDHHAVEDRELKDHLLRKYSGYLSSLKQEFMKKKKKGKLPKDARQKLLDWWTVHYKWPYPSETEKIALAECTGLDQKQINNWFINQRKRHWKPSEDMQLMAMDGQSPHGATLYVERHLMTEGYHLDC

SEQ ID NO: 1079 - protein, 365 aa, Oryza sativa
KKQQGRRVTADVLWPGMLRKGKAAAAEEDFERGMSDDEAEGGGGEEEEDDDDVVVVVPPPAAARFVVRAAAKAAPPTADGMLTTKLVQHDGPTARSAKHKRKNQYRGIRQRPWGKWAAEIRDPSKGVRVWLGTYNTAEEAARAYDAEARKIRGKKAKVNFPDEPAVAQKLSLKQNAAKQEKLAPPLKTCGDDAFFQLNSSDNDLFAMLAKVPAKPAEPVDLMPPVKPLASTETFEMNMLSDTSSNSFGSSDFGWEDDTLTPDYTSVFVPNAAMPAYGEPAYLTGGAPKRMRNNYGIAVPQGNGMPNLAQNMPTFDPEMKYLPLPYVESSSDESMDNLLQNDATQDGASNEGIWSLDELLMAAGAY

SEQ ID NO: 1080 - protein, 446 aa, Lycopersicon hirsutum
RMSVDVGAPSPRSIQMDEQVNPGEEYAPKIRKPYTISKQRERWSEEEHKKFLEALKLHGRAWRRIEEHVGTKTAVQIRSHAQKFFSKVVRESSNGDASSVKSIDIPPPRPKRKPMHPYPRKMATPLKSGTLASEKLNRSGSPDLCLSEPENQSPTSVLSTLGSDAFGTVDSTKPSEQSSPVSSAVAENSGDLVLSEPFDFVVEESRSSPARAYDSSNPANQACVKLELFPEDNDFVKEGSDEASSTQCLKLFGKTVLVTDAHKPPTDETLTRSSFPAKYLPWDSECPQSTFSIVPPTPSYYFPTPNGSPGPNQSGVATHLPWGSSCAVPCTQVHSPIPMKGRPLFNDRDLEGKEAQKEGSSTGSNAESVDAELSGDKNMEIEAQSSRNVVEESVRASVPSLFERRANSTKRVKGFVPYKRCLAERGMSSSTLTGEEREEQRTRLCL

SEQ ID NO: 1081 - protein, 354 aa, Arabidopsis thaliana
  misc_feature (116)..(116): Xaa can be any naturally occurring amino acid
  misc_feature (203)..(203): Xaa can be any naturally occurring amino acid
  misc_feature (230)..(230): Xaa can be any naturally occurring amino acid
  misc_feature (249)..(249): Xaa can be any naturally occurring amino acid
MAFHNNHFNHFTDQQQHQPPPPPQQQQQQHFQESAPPNWLLRSDNNFLNLHTAASAAATSSDSPSSAAANQWLSRSSSFLQRGNTANNNNNETSGDVIEDVPGGEESMIGEKKEAXGWQNARHKAEILSHPLYEQLLSAHVACLRIATPVDQLPRIDAQLAQSQGVVAKYSTLEAAQGLLAGDDKALDHFMGSLLMWDQEKNXSDDKDEQVEGADHLNSEAEMGKGFGQXIPMRARVLLMERVRHELQXHKLKQGYKEKIVDIREEILRKRRAGKLPGDTTSVLKSWWQSHSKWPYPTEEDKARLVQETGLQLKQINNWFINQRKRNWHSNPSSSTVSKNKRRSNAGENSGRDR

SEQ ID NO: 1082 - protein, 293 aa, Hordeum vulgare subsp. spontaneum
MSPTLSLKLKKSSHTPQSSVSSSTKLRLFKKEAACQSPSTLPVAMDMGLEVSSSSPSSSSVSSSPEHAARRASPAKRPAGRTKFRETRHPVYRGVRRRGNTERWVCEVRVPGKRGARLWLGTYATAEVAARANDAAMLALGGRSAACLNFADSAWLLAVPSALSDLADVRRAAVEAVADFQRREAADGSLAIAVAKEASSGAPSLSPSSGSDSAGSTGTSEPSANGVFEGPVVMDSEMFRLDLFPEMDLGSYYMSLAEALLMDPPPTATIIHAYEDNGDGGADVRLWSYSVDM

SEQ ID NO: 1083 - protein, 297 aa, Zea mays
MDWGNRTKAAAAAAAPDERAGGGEGLGGYVKVMTDEQMEVLRKQISIYATICEQLVEMHRVLTEHQDTIAGGLLGSVCYLTMVITGLRFSNLYCDPLIIPGGHKITARQRWQPTPMQLQILESIFDQGNGTPSKQKIKEITAELSQHGQISETNVYNWFQNRRARSKRKQAAASLPNNAESEAEADEEPLADKKPKSDRPPPPPPPIQDNTKATGALSADRVSGGTRHLDTGHDQTSGVMYGCNDSGLLRSSGSSGQMSLYENFMSNPRIDRFPAKVESSRSFPHLQQHGEGFGMFG

SEQ ID NO: 1084 - protein, 268 aa, Arabidopsis thaliana
MMEWDNQLQPNNHHSSNLQGIDVNGGSGAGGGMYVKVMTDEQYETLRKQIAIYGTICERLVEMHKTLTAQQDLAGGRMGGLYADPMMSSLGHKMTARQRWTPTPVQLQILERIFDQGTGTPSKQKIKDITEELSQHGQIAEQNVYNWFQNRRARSKRKQHGGGSSGNNNGESEVETEVEALNEKRVVRPESLLGLPDGNSNNNGLGTTTATTTAPRPEDLCFQSPEISSDLHLLDVLSNPRDEHLVGKMGLAESYNLYDHVEDYGMSG

SEQ ID NO: 1085 - protein, 373 aa, Arabidopsis thaliana
MISQREEREEKKQRVMGDKKLISSSSSSSVYDTRINHHLHHPPSSSDEISQFLRHIFDRSSPLPSYYSPATTTTTASLIGVHGSGDPHADNSRSLVSHHPPSDSVLMSKRVGDFSEVLIGGGSGSAAACFGFSGGGNNNNVQGNSSGTRVSSSSVGASGNETDEYDCESEEGGEAVVDEAPSSKSGPSSRSSSKRCRAAEVHNLSEKRRRSRINEKMKALQSLIPNSNKTDKASMLDEAIEYLKQLQLQVQMLTMRNGINLHPLCLPGTTLHPLQLSQIRPPEATNDPLLNHTNQFASTSNAPEMINTVASSYALEPSIRSHFGPFPLLTSPVEMSREGGLTHPRLNIGHSNANITGEQALFDGQPDLKDRIT

SEQ ID NO: 1086 - protein, 498 aa, Oryza sativa
KGLDCTVILSSLSNKKRWKKQLMEEFELQQQPYYSKLLLGSPLEIANVDDSDLQLVAGVPSDPPPAPPTAVKKKKKRSLPGTPDPSAEVVALSPRTLLATNRFVCEICGKGFQRDQNLQLHRRGHNLPWKLRQRGGAGGGGGGEPPRKRVYVCPEASCVHHSPSRALGDLTGIKKHFCRKHGEKKWKCDRCGKRYAVHSDWKAHSKVCGTREYKCDCGTVFSRRDSFVTHRAFCDALAQENNKLAQPMNMAAVTSALQGQQQAHHPVADDDDAAGVKSPHLKMFPDVDNIVAAATAGNPLLPPPLSMAGCMLSSLAAPLSSPFLPGCKLGVDAARDAAMVFPPPPPPAGSAAAIMSATALLQKAAELGATTSTGCYGGVAFPAMGIAGGLDRLPAIGHHLAPYDDVVVPAALQGQTATQLVGFDLGGLLPGQLYGGGGGAMTRAIGSLMHGGDQHAGVVDRRRGEGVRVVDYMGVDDDDDHGCFDGVGPFGPHIGPWA

SEQ ID NO: 1087 - protein, 310 aa, Glycine max
FGSRTFADFCLSLSYHHNSQSSETERDGERGGIQKQLQRWQQSGNVNVNVNVDANGELMYVKVMTDEQLETLRKQIAVYGTICEQLIEMHRTLSAQQDLAGVRLGNIYCDQLMTSGGHKITSRQRWTPTPVQLQILERIFDQGNGTPSKEKIKEITAELGQHGQISETNVYNWFQNRRARSKRKLQNVAPSNTESEVDTEVDSKNKKTKAEEEFQSQHNITTSGGAEKLCFQNPQVYSDHLHYLNPDSNKPYSMCQSDCNLKSTRNSSHVSVFNEMLSNSRSEYVGGKMEVAGSVSYNLFHQTGDCNLAG

SEQ ID NO: 1088 - protein, 90 aa, Vernonia galamensis
REQDRFMPIANVIRIMRKILPPHAKISDDAKETIQECVSEYISFVTGEANDRCQREQRKTITAEDVLWAMSKLGFDDYIEPLTVYLHRYR

SEQ ID NO: 1089 - protein, 90 aa, Argemone mexicana
  misc_feature (75)..(75): Xaa can be any naturally occurring amino acid
REQDRYMPIANVIRIMRKVLPTHAKISDDAKETIQECVSEYISFITSEANDRCQREQRKTITAEDVLWAMSKLGXDEYIEPLTLYLQRYR

SEQ ID NO: 1090 - protein, 465 aa, Burkholderia mallei ATCC 23344
MPHALIVEDDPNSLSGLTALLGADGFSVDTATSLAEARGALARSIPDVVLVDLNLPDGSGFDLLQNLPQQQPNGSLPVIVLTGNATVESAIEGLRHGVWDYLLKPVNIPRLRSLLARIPRPYELIEEVQALRATLRRLGRFGSLVGRSDAIQHVYDMIEHNARTETAVLLWGEPGTGKEAAARTLHELSRRRKGPFIAFDCRAAVQSPRNIETNGRAIESMLLGRERGAYTGVERRDPGLFEQASGGTLLLGEITALPLSLQEALLRALDSQNFMRVGGTTEIASDFRLIATTRRPAREAVANGTLREDLWLRLDAASIGLPPLRERDDDVVVMAEAFVDDLNRDARAAGLNITDKRLAPGFIRECLAYDWPGNVRELQERVRIAYDQSGDFIETLRAGDAYPQPGAALNGSSVQVRVGTPLADVEDLLIRATLDAVGGTRHRAATLLGISPKTLYNKLQRMKIG

SEQ ID NO: 1091 - protein, 807 aa, Zea mays
MVAAAAAAGGGADAGCGGGGGGGGKDALFVELWKACAGPLSSVPLLGEKVYYFPQGHIEQVEASTNHLAEHQGTPLYNLPWKIPCKLMNMELKAEPDTDEVYAQLTLLPDKKQDENTSARVENEEAEEEVVPHVPPATSEGLRIHSFCKTLTASDTSTHGGFSVLRRHADECLPPLDMSQHPPNQELVAKDLHGVEWRFRHIFRGQPRRHLLQSGWSVFVSAKRLVAGDAFIFLRGENGELRVGVRRALRHQTTIPSSVISSHSMHLGVLATAWHAVNTGSMFTVYYKPRTSPAEFVVSRARYCESLKRNYSIGMRFRMRFEGEEAAEQRFTGTIVGICVSDPSGWADSKWRSLKVRWDEASSVPRPERVSPWQIEPAVSPSPVNPLPVRFKRSRSSVNASPSDVSTVNREVASKVMVESQQNNLPRALHNQGRTQLTGRYRDSTDVKTAQDLTMWSSGTEQQRNNIAAQTKRCLEGWTQSRTPEGYNQLFSAFQPLKDAHNPLRPFPNKISGTRSSTWVTADARYPAQQANHNMLHGTLSFMPHSSGFRMIQQNNLVMPEAANFTGKSAFTSVQGHVTDQCSTGWFGPIESNSHTDHASSSLIRSQPLVIGNDVQKTKGTSFKLFGIPLGSPEKSEPLVSPPSVAYDGKLQTSPTDNNEPCSEATQNIQNKVPSSSTRSCKKVHKQGSALGRSIDLTKFACYDELIAELDQMFDFDGELKSPCRNWLVVYTDNEGDMMLVGDDPWNEFCDMVHKIFIYTREEVERMNPGALNSRLEDCLSESLGRGLASKEPRSGPSTSAVDSENC

SEQ ID NO: 1092 - protein, 446 aa, Lycopersicon hirsutum
RMSVDVGAPSPRSIQMDEQVNPGEEYAPKIRKPYTISKQRERWSEEEHKKFLEALKLHGRAWRRIEEHVGTKTAVQIRSHAQKFFSKVVRESSNGDASSVKSIEIPPPRPKRKPMHPYPRKMATPLKSGTLASEKLNRSGSPDLCLSEPENQSPTSVLSTLGSDAFGTVDSTKPSEQSSPVSSAVAENSGDLVLSEPFDFVVEESRSSPARAYDSSNPANQACVKLELFPEDNDFVKEGSDEASSTQCLKLFGKTVLVTDAHKPPTDETLTRSSFPAKYLPWDSECPQSTFSIVPPTPSYYFPTPNGSPGPNQSGVATHLPWGSSCAVPCTQVHSPIPMKGRPLFNDRDLEGKEAQKEGSSTGSNAESVDAELSGDKNMEIEAQSSRNVVEESVRASVPSLFERRANSTKRVKGFVPYKRCLAERGMSSSTLTGEEREEQRTRLCL

SEQ ID NO: 1093 - protein, 281 aa, Glycine max
  misc_feature (164)..(164): Xaa can be any naturally occurring amino acid
  misc_feature (199)..(199): Xaa can be any naturally occurring amino acid
MGSASVTKAPPSSSSSPNSSSTESLDGLKFGQKIYFEEVSVAAAAATTTQGGNKTRGGVSASKKGRGGSVQAPRCQVAGCKVDLSGAKAYYSRHKVCAMHSKSPTVTVAGLEQRFCQQCSRFHLLSEFDQGKRSCRKRLAGHNERRRKPPPSSILTSRYGRLSXPIFDNNGRDDGFLMEFASYPKLTLRNTLPTQRSTXSRLLGNHAATLTWQGGSDTPSEFFLQGSGSSGGTSFLNSKHPLVESYTGVTDSNCALSLLSSQTLGFRNTAPATKFELNNNL

SEQ ID NO: 1094 - protein, 207 aa, Triticum aestivum
MVQPKKKFRGVRQRHWGSWVSEIRHPLLKRRVWLGTFETAEEAARAYDEAAVLMSGRNAKTNFPVQRSSTGDPAPAATRDVRGGSSSSSTSNLSQVLSAKLRKCCKAPSPSLTCLRLDTEKSHIGVWQKRAGARADSNWVMTVELNKGAGPSGDAVAAQSTVSATTASSPASTMDDEERLTLQMIEELLSSSGPASPSHGEEGSFVV

SEQ ID NO: 1095 - protein, 300 aa, Oryza sativa
MGPDNGANNNSNLAARQRLRWTNELHERFVEAVTQLGGPDRATPKGVLRIMGVQGLTIYHVKSHLQKYRLAKYIPDSSADGNKAENKDPGDLLAGLEGSSGLQISEALKLQMEVQKRLHEQLEVQRQLQLRIEAQGKYLKKIIEEQQRLGGVKSETPAAGASVTLPSDQFPDSERTDPSTPAPTSESPTQGVPSNRDNGGQNEATKSPQRDDSLSRHEPLTPDSNCQPGSPTASPKHERAAKRQRGNGAEFSETDFALPHSIFESSSGSEFQQCSMSYSAVELGSLKVALCRGVDFCSSG

SEQ ID NO: 1096 - protein, 176 aa, Perilla frutescens var. crispa
MAADEEPNTSLNKGAWTADEDGILAQYVAQHGPKRWKSLAIDAGLNRCGKSCRLRWLNYLRPDIKRGNFSDAEDDLILRFHRLLGNRWSLIAKRIPGRTDNEIKNYWNTHLRKKARLMEKLPAISVTAAMELNIWHDESSSSGTEIRDDDESFDFTAQGTSGLDWVKTFLELEEDA

SEQ ID NO: 1097 - protein, 262 aa, Oryza sativa
MAVFGEALAVKLLSEPYVQRSIALKWQRGCQMYEPKPFSSIVLAHNDPVSHNQQIERINNNVVSNSGGNSSNSNFAARQRLRWTDDLHDRFVDAVTQLGGPDRATPKGILRIMGVQGLTIYHVKSHLQKYRLAKYIPDPTADGAKSDKKDLGDLLADIESSSGMEIGEALKLQMEVQRQLQLPIESPRKYLQKIIEEHQRLNGVLGDSSKLGALGPAPGEPYQDSNKTDPSTPVPTSESPIRDKAGSGLFKTISSHDDCASL

SEQ ID NO: 1098 - protein, 190 aa, Glycine max
MGRPPCCDKEGVKKGPWTPEEDIILVSYIQEHGPGNWRAVPAKTGLSRCSKSCRLRWTNYLRPGIKRGNFTEQEEKMIIHLQDLLGNRWAAIASYLPQRTDNDIKNYWNTHLRKKLKKMQAGGEGGSFGEGFSASRQIPRGQWERRLQTDIQMAKRALSEALSQRKSHLYLPTQTLQIVAAPSLPTNQQQ

SEQ ID NO: 1099 - protein, 356 aa, Streptocarpus dunnii
GSAGNVNMTSSFKGANSYMGFGDNVNGLCPMMMMMPANDPNGDCSQPLFLPLPAANQQGINRNSSSAAACGGSMMPEHQSNTSTGYYFMEGDGVAGGGSVKSKIMAHPHYPRLLAAYVNCQKIGAPPEVVAKLEEACASTITIGGRNERSCVGEDPALDQFMEAYCEMLTKYEQELSKPFKEAMLFLSRIECQFKALTLSHSSDSGACGEAVMERNGSSEEEFDVNNSFIDPQAEDRELKGQLLRRYSGYLGNLKQEFMKKRKKGKLPKEARQQLLDWWSRHYKWPYPSESQKLALAESTGLDQKQINNWFINQRKRHWKPSEDMQFVVMDATHPHYYMDNFIGTPFPMDISPSFL

SEQ ID NO: 1100 - protein, 358 aa, Streptocarpus rexii
MEGSAGNMNMTSSFKGANSYLGFGDNVNGFCPMMMMMPANNPNGDCSQPIFQPLPAANQQGINRNSSSAAACGGSMMPEHQSNTSTGYYFMEGDGDAGGGSVKSKIMAHPHYPRLLAAYVNCQKIGAPPEVVAKLEEACASTITIGGRNERSCVGEDPALDQFMEAYCEMLTKYEQELSKPFKEAMLFLSRIECQFKALTLSHSSDSGACGEAVLERNGSSEEEFDVNNSFIDPQAEDRELKGQLLRRYSGYLGNLKQEFMKKRKKGKLPKEARQQLLDWWSRHYKWPYPSESQKLALAESTGLDQKQINNWFINQRKRHWKPSEDMQFVVMDATHPHYYMDNFMGTPFPMDISPSFL

SEQ ID NO: 1101 - protein, 258 aa, Zea mays
GPGVPPPGVGPPQPDETDSLQQVGWKLAQFAHTIRVDFQYRGLVAATLADLEPFMLQPEGEEDPNEEPEVIAVNSVFEMHRLLAQPGALEKVLGTVRAVRPRIVTVVEQEANHNSGTFLDRFTESLHYYSTMFDSLEGGSSGGPSEVSSGAAAAPAAAGTDQVMSEVYLGRQICNVVACEGAERTERHETLGQWRNRLGNAGFETVHLGSNAYKQASTLLALFAGGDGYKVEEKEGCLTLGWHTRPLIATSAWRLAAP

SEQ ID NO: 1102 - protein, 353 aa, Streptocarpus saxorum
MEGSAGNLNLNSYRGANSFMGFGDNVNGFSPMMMMMHANDPNGDCSQPIFLPLPAANHQGINRNTGGGGGLTPEHHSNMSTGYYFMEGDGDAGGSSVKSKIIAHPHYPRLLAAYVSCQKIGAPPEVVAKLEEVCASATSTGCRNERSCVGEDPALDQFMEAYCGMLTKYEQELSKPFKDAMLFFSRFECQFKALTLSHSADSGACDEAVLEQNGSSEEEFDVNNSFIDPQAEDHELKGQLLRKYSGYLGNLKQEFMKKRKKGKLPKEARQQLLDWWSRHYKWPYPSESQKLALAESTGLEQKQINNWFINQRKRHWKPSEDMQFVVMDAAHPHYYMDNIMATPFPMDISSSFL

SEQ ID NO: 1103 - protein, 193 aa, Lactuca sativa
MAEVAQKLEHLEGVLGNDDGLSQLASVSVHYNPSDLSSWLESMICELNPTNQPTVIDDSFVNNTSSVTPSAVDSSSVFVDDLQRIPGNAIYPPAKKQKPSSPSTGASSSYNPNPIVLVDTQENGIRLVHTLMACAEAVQQDDLKLAETLVKQAGILAVSQAGAMRKVATYFAEALARRIYRLYPKTPQDSPAF

SEQ ID NO: 1104 - protein, 499 aa, Oryza sativa
MGSMYRHLRDRSSRRRRFSPAWRQELARQESPGVAGGRRQGRWCRSWHGRRIGRDDQEVRARTANTIDIDHDLEILVVIFACYDNIGTERSAYFRQIEEDVGTHPAAILELKDAVGAFQSMDMGELARFEGFPSKKLEALRMAAALYSKLDGVVATPIKVTSLTRQQQDRYAAPPDEHARLEQHQQAAHAHPCGDELTDPERSRRKHCTGEALGSSESEQPTRPARPRGKRSRAAEVHNLSEKRRRSRINEKMKALQSLIPNSSKTDKASMLDDAIEYLKQLQLQVQMLSMRNGLYLPPVNLSGAPEHLPIPQMSAALDQNSAKASDPSVVLQPVNQTSGALLPFELASQHKPLFLPGVPNATALEPRFLVESSRSNLQSLRFTEPAEMIYPDEMMLKHRLTSASESTIVPGTDEKSVRQNTYMMNADRFDRYALSKDQLQHIMPKNTESVLDMPHLQRILTKVLIVSDYKLTIQLPILDRLQTSDTKVRVEGRIKVNP

SEQ ID NO: 1105 - protein, 242 aa, Lactuca sativa
MAEVAQKLEQLEMVMGEDGILQLSDTVHYNPSDLSGWVQSMLSELNTNSSDNSSSTNFGIVLPGESSSTTMIDFSNNKQIDTQQTGGKMYDDDPYDLRAIAGGAIYGTTAEESPVSRNGIKRMKAAAPGSEAVDVPPESPKPVVLVDSQEVGIRLVHTLMACAEAVQQDNLKLADALVKHVGLLAASQASAMGKVATYFAGALAQRIYKIYPQDGLETSCWEILQMHFYESCPYLKFAHFTA

SEQ ID NO: 1106 - protein, 185 aa, Glycine max; identical to SEQ ID NO: 146

SEQ ID NO: 1107 - protein, 429 aa, Glycine max
  misc_feature (83)..(83): Xaa can be any naturally occurring amino acid
MSFRSIVRDVRDSFGSLSRRSFDVRLTGHHRGKSQGSVQDLHDQPLVIQNSRWASLPPELLFDIIRRLEESENTWPARKHVRXVACAAVCQSWRNMCKDIVKSPEFCGKLTFPVSLKQPGPRDGIIQCFIKRDKSNLTYHLFLCLSPALLVENGKFLLSAKRTRRTTYTEYVISMDADNISRSSNTYIGKLRSNFLGTKFIIYDTQPPYSSAHICPPGTGKTSRRFYSKKVSPKVPSGSYNIAQVTYELNVLGTRGPRKMHCVMHSIPASALDAGGTVPGQPELLPRSLEDSFRSISFSKSLDHSIEFSSSRFSEIGESCIEDDDGKMRPLVLKNKPPRWHEQLQCWCLNFRGRVTVASVKNFQLIAATQPAAGAPTPSQPAPPEHDKIILQFGKVGKDMFTMDYRYPLSAFQAFAICLSSFDTKLACE

SEQ ID NO: 1108 - protein, 87 aa, Oryza sativa (japonica cultivar-group)
MSSRSSSSSRNSNSVNMDSEWSKKENKLFEEALAYYGEGAPDLFHKVSRAMGGTKTADEVRRHYEILEDDLKLIEARRVPFPKGGSI

SEQ ID NO: 1109 - protein, 249 aa, Fragaria x ananassa
MAYENKPNTDLDADAQRRLGRGKIEIKRIENTTNRQVTFCKRRNGLLKKAYELSVLCDAEVALIVFSNRGRLYEYSNNSSVRETIERYKKACADTSTNGSASEATTQYYQQEAAKLHNQINALQNINRGYMAEGLSNKNIKELKGMERKLERAITRIRSKKNELLFAEIEYMQKRELDLHNNNQLLRAKIAENERQQQSIIAITGGHGSYEIVQPTQPFHEARNYFQVNALQPNIHQYSCHDQVSLQLV

SEQ ID NO: 1110 - protein, 534 aa, Pinus taeda
MGRHSCCYKQKLRKGLWSPEEDEKLVRHITKYGHGCWSAVPKQAGLQRCGKSCRLRWINYLRPDLKRGTFSPQEENLIVELHSVLGNRWSQIATHLPGRTDNEIKNLWNSCIKKKLRQRGIDPNTHRPLSEVNAEAGDSKNDNSNKKVETQAAMDESHVSAGNEFKHLNAIPRADTANPKFFHVPVEDNTLIASDSQAMLQNGFINSNSTTTTTTATSTASAANFSLPKEFFLERFNSVNATPTSVEAGFNFINQTTSTQGFTGERDQKLIDNPVLWVLQAPNRSVGFPTENLMPWPGQGLAKAVSDAFSDFSSDVCDYNSIMANPSMYRPGPCLSSLLYSERSLDQDLLDNAGTNCMNGSGAAGSAQYWDNTDNNNNNNVRSSSRSSSCNSSTANLEVNNGAAFGHFWGFGERLDATDITSENERKAPLFLERADQSEYAVKWSEMLPPFSSHTQEETLPIYITTDSKSQDLVSSENINNPNHAALNSAIFPISWQQLQNTEYPVLGDRTATMLSTPLSDPDFHRIAAVLDQI

SEQ ID NO: 1111 - protein, 150 aa, Nicotiana tabacum
QDGILKYMLKMMEVCKAQGFVYGIIPEKGKPVTGASDNLKEWWKDKVRFDRNGPAAIAKYQADNAIPGKNEGSNPIGPTPHTLQELQDTTLGSLLSALMQHCDPPQRRFPLEKGVPPPWWPTGQEDWWPQLGLSKDQGPPPYKKPHDLKK

SEQ ID NO: 1112 - protein, 542 aa, Zea mays
MSARDSNHSYKCSDDSQMPYYNNSAPVGENGRIHMAENSLGHHYSSSDIGSQRINNSNPQVFEAQYCTLESSSANGVYPAQSSTSSHSISPLSGSPLSQHDSHSDHTYSSPPSASCLTEVADLLIQQKELENSIVGPGLDISSDCSRSLLQAHVPVRPDNWRQLLGINGGDLMQVVIACGKAVAENDVFATELLISELGHLVSVSGDPMQRLGAYMLEGIVARLSSSGSMLYKSLKCKEPTSSELMSYMHLLYEICPFYKFGYMSANGAIAEAIKGENFVHIIDFQIAQGSQWVTLLQALAARPGGPPYIRITGIDDSNSAYARGGGLDIVGRTLCDVANSCGLPFEFNAVPAASHEVELQHLAIRHGEIIAVNFAYQLHHVPDESVSTENHRDRIIRMIKSINPRVVTLVEQESNTNTAPFFPRYMETLNYYTAMFESIDVALPRDDRRRMSAEQHCVARDIVNLIACEGAERVERHELFGKWKSRFAMAGFRPYPLSSVVNNTINTLLHTYNSYYRLEERDGVLYLGWKNRVLVVSSAWC

SEQ ID NO: 1113 - protein, 179 aa, Zea mays
MAEAPASPGGGGGSHESGSPRGGGGGGSVREQDRFLPIANISRIMKKAIPANGKIAKDAKETVQECVSEFISFITSEASDKCQREKRKTINGDDLLWAMATLGFEDYIEPLKVYLQKYREMEGDSKLTAKSSDGSIKKDALGHVGASSSAAEGMGQQGAYNQGMGYMQPQYHNGDISNV

SEQ ID NO: 1114 - protein, 514 aa, Oryza sativa (japonica cultivar-group)
MMLKDLAEIQQQQLLAAAEENMSNLTSASGDQASVSSHPAPPPAKKKRSLPGNPDPEAEVIALSPRTLMATNRYVCEICGKGFQRDQNLQLHRRGHNLPWKLKQRNPKEVVRKKVYVCPEAGCVHHDPARALGDLTGIKKHFSRKHGEKKWKCDKCSKRYAVHSDWKAHSKVCGTREYRCDCGTLFSRRLSWPPPPPPPWPSSEVLMIGLRCGCRRDSFITHRAFCDALAEESARAVTAAAAVAGQQQHGGGMLFSQVADVLDHQAAMAMGGHGLMQELCLKREQQQQQQQFAPSWLTAQQQQQQLEAMAGAGNPAAMYGSARLDQEFIGSSTPESGGAQQAGLSFGFSSTSSAPPHPAASSAHMSATALLQKAAQMGATLSRPSSHAHMAAAAAASTHNSSSSAATTNAPPPPPTSNVSSTCVGAGGYGLAFEASHFIAADESSRGARSDRDTGNGVAGAGNDGLTRDFLGLRAFSHGNIMSMAGFDPCMSTTSASSAAPYDHHHHSNKPWHS

SEQ ID NO: 1115 - protein, 922 aa, Pisum sativum
MEYGGGIVDDGGVFGTMVGGDQGDIIEELLGEGCWIEASENNMMAMQQTASPPQQHYIGNNIPIGMGEGDHFNHHQVDQESGFVVGKRWWIGPRGSQGPSTSVKERLVVAVGYLKEYTKNSSNNVLIQIWVPALRRRSAIHYLQQDSSSSVPVSVNPNMNVHVRFFRSHEYPRHQQQQQQYGSLLALPVFERGSGTCLGVIEFVIANQNLINYRPQLDHLSNALEAVDFRSSHNMNIQPAVKVIFEELYEAAVNEIVEVLASVCKTHNLPLALTWAPCIQQQGGGKGTTGGGGCSVSVTVPTDQMNNNNHMMMSCISTVDSACYVGDMEVLGFQEACSEYHLFNGQGIVGTAFTTTKPCFAIDITAFSKAEYPLAHHADMFGLHAAVAIPLRSVYTGSAADFVLEFFLPKDCRDTEQQKQMLNSLSLVVQQACRSLHLHVVMEDDNANHHEDQDQFTFPTTTNNYMPSSASDAATTASLSQVDAASGCSTKDTTSSSCSWIAHMMEAQNKGKGVSVSLEYLQEPKEEFKVTTCNWEREGNSVFSEFGQVIQHDQSSNSRASVEAGEESGGGGTGGGRRSSSSSSGRKSGDKRRTKAEKTISLPVLRQYFAGSLKDAAKSIGGCPTTLKRICRQHGITRWPSRKIKKVGHSLKKLQLVIDSVQGAEGAIQIGSFYASFPELSTAAAHGGGGGGDHINNNSFYNSHGDLVTNLKSPPSACSQTHAAGNKSIINGDHHHHHHQHLVMTENLAAPSAVDALMQHASTINIQDYQQLQEDHDTKQLLLHFNNNNNNSNNQTLPPRPTVTWNNNNSSSSGLLERGAFRVKATFADEKIRFSLQAVWCFRDLQLEIARRFNLNDMNNLVLKYLDDEGEWVVLACDSDLEECKDLHTSSHTRTIRLSLFQASPLNNLANSFRNNSSSPSS

SEQ ID NO: 1116 - protein, 307 aa, Oryza sativa
MAETNHLLLLLLSPPRLRLLSWTPTTPLACAALSRAAKLSRDLVSEKGERGIRSFKKNIAEQHMQKALTTLNSEETIYASYCTLTNSFFASQVRAITYSKASLGLDQLAAIGSLYQFIRGGGEGKEAASQEEEQTPKLRSVIAHLVSRKRRRDRINEKLKALQELLPNCTKTDKVSMLDEAIDYLKSLQLQLQMLVMGKGMAPVVPPELQQYMHYITADPSQIPPIRPSEPRPFQITHATQQRQSNVESDFLSQMQNLHPSEPPQNFLRPPKLQLYTPEQQRRGLASSSGHNSGWITERNSSYNFLE

SEQ ID NO: 1117 - protein, 461 aa, Burkholderia sp. 383
MPHALIVEDDPNSLSGLTALLAADGFSVDTATSLAEARTALGRSIPDVVLVDLNLPDGSGFDLLQHLPQQQPNGSLPVIVLTGNATVESAIEGLRHGIWDYLLKPINIPRLRSLLARIPRPYELIDEVQSLRASLRHLGRFGALVGRSDAMQHVYDMIEHNARTETAVLFAGEAGTGKKLAARTLHDLSRRRKGPFVSFDCRTIAHAGRHGASLDSVLFGHERGAFDGAERRESGLFEQAGGGTLFLDEITTLPLVLQEALLHALDSQNFMRIGGTSSITSDFRLIATTRRPAREAVANGTLREDLWLRLDAASITMPPLRERDGDALAIADALIDELNRDARATGRSTTDKRAAPGFVRECLSYEWPGNVRELQERVRFAYDASGDFIETLRAGEPSFSAGTALNGSSVQIKVGTPLSDVEDLLIRATLDAVGGTRHRAATLLGISPKTLYNKLQRMKVN

SEQ ID NO: 1118 - protein, 924 aa, Pisum sativum
MEYGGGIVDDGGVFGTMVGGDQGDIIEELLGEGCWIEASENNMMAMQQTASPPQQHYIGNNIPIGMGEGDHFNHHQVDQESGFVVGKRWWIGPRGSQGPSTSVKERLVVAVGYLKEYTKNSSNNVLIQIWVPALRRRSAIHYLQQDSSSSVPVSVNPNMNVHVRFFRSHEYPRHQQQQQQYGSLLALPVFERGSGTCLGVIEFVIANQNLINYRPQLDHLSNALEAVDFRSSHNMNIQPAVKVVFEELYEAAVNEIVEVLASVCKTHNLPLALTWAPCIQQQGGGKGTTGGGGCSVSVTVPTDQMNNNNHMMMSCISTVDSACYVGDMEVLGFQEACSEYHLFNGQGIVGTAFTTTKPCFAIDITAFSKAEYPLAHHADMFGLHAAVAIPLRSVYTGSAADFVLEFFLPKDCRDTEQQKQMLNSLSLVVQQACRSLHLHVVMEDDNANHHEDQDQFTFPTTTNNYMPSSASDAATTASLSQVDAASGCSTKDTTSSSCSWIAHMMEAQNKGKGVSVSLEYLQEPKEEFKVTTCNWEREGNSVFSEFGQVIQHDQSSNSRASVEAGEESGGGGTGGGRRSSSSSSGRKSGDKRRTKAEKTISLPVLRQYFAGSLKDAAKSIGGPTTLKRICRQHGITRWPSRKIKKVGHSLKKLQLVIDSVQGAEGAIQIGSFYASFPELSTAAAHGGGGGGGDHINNNSFYNSHGDLVTNLKSPPSACSQTHAAGNKSIINGDHHHHHHHQHLVMTENLAAPSAVDALMQHASTINIQDYQQLQEDHDTKQLLLHFNNNNNNNSNNQTLPPRPTVTWNNNNSSSSGLLERGAFRVKATFADEKIRFSLQAVWCFRDLQLEIARRFNLNDMNNLVLKYLDDEGEWVVLACDSDLEECKDLHTSSHTRTIRLSLFQASPLNNLANSFRNNSSSPSS

SEQ ID NO: 1119 - protein, 921 aa, Pisum sativum
MEYGGGIVDDGGVFGTMVGGDQGDIIEELLGEGCWIEASENNMMAMQQTASPPQQHYIGNNIPIGMGEGDHFNHHQVDQESGFVVGKRWWIGPRGSQGPSTSVKERLVVAVGYLKEYTKNSSNNVLIQIWVPALRRRSAIHYLQQDSSSSVPVSVNPNMNVHVRFFRSHEYPRHQQQQQQYGSLLALPVFERGSGTCLGVIEFVIANQNLINYRPQLDHLSNALEAVDFRSSHNMNIQPAVKVFEELYEAAVNEIVEVLASVCKTHNLPLALTWAPCIQQQGGGKGTTGGGGCSVSVTVPTDQMNNNNHMMMSCISTVDSACYVGDMEVLGFQEACSEYHLFNGQGIVGTAFTTTKPCFAIDITAFSKAEYPLAHHADMFGLHAAVAIPLRSVYTGSAADFVLEFFLPKDCRDTEQQKQMLNSLSLVVQQACRSLHLHVVMEDDNANHHEDQDQFTFPTTTNNYMPSSASDVATTASLSQVDAASGCSTKDTTSSSCSWIAHMMEAQNKGKGVSVSLEYLQEPKEEFKVTTCNWEREGNSVFSEFGQVIQHDQSSNSRASVEAGEESGGGGTGGGRRSSSSSSGRKSGDKRRTKAEKTISLPVLRQYFAGSLKDAAKSIGVCPTTLKRICRQHGITRWPSRKIKKVGHSLKKLQLVIDSVQGAEGAIQIGSFYASFPELSTAAAHGGGGGGDHINNNSFYNSHGDLVTNLKSPPSACSQTHAAGNKSIVNGDHHHHHHQHLVMTENLAAPSAVDALMQHASTINIQDYQQLQEDHDTKQLLLHFNNNNNNSNNQTLPPRPTVTWNNNNSSSSGLLERGAFRVKATFADEKIRFSLQAVWCFRDLQLEIARRFNLNDMNNLVLKYLDDEGEWVVLACDSDLEECKDLHTSSHTRTIRLSLFQASPLNNLANSFRNNSSSPSS

SEQ ID NO: 1120 - protein, 924 aa, Pisum sativum
MEYGGGIVDDGGVFGTMVGGDQGDIIEELLGEGCWIEASENNMMAMQQTASPPQQHYIGNNIPIGMGEGDHFNHHQVDQESGFVVGKRWWIGPRGSQGPSTSVKERLVVAVGYLKEYTKNSSNNVLIQIWVPALRRRSAIHYLQQDSSSSVPVSVNPNMNVHVRFFRSHEYPRHQQQQQQYGSLLALPVFERGSGTCLGVIEFVIANQNLINYRPQLDHLSNALEAVDFRSSHNMNIQPAVKVFEELYEAAVNEIVEVLASVCKTHNLPLALTWAPCIQQQGGGKGTTGGGGCSVSVTVPTDQMNNNNHMMMSCISTVDSACYVGDMEVLGFQEACSEYHLFNGQGIVGTAFTTTKPCFAIDITAFSKAEYPLAHHADMFGLHAAVAIPLRSVYTGSAADFVLEFFLPKDCRDTEQQKQMLNSLSLVVQQACRSLHLHVVMEDDNANHHEDQDQFTFPTTTNNYMPSSASDAATTASLSQVDAASGCSTKDTTSSSCSWIAHMMEAQNKGKGVSVSLEYLQEPKEEFKVTTCNWEREGNSVFSEFGQVIQHDQSSNSRASVEAGEESGGGGTGGGRRSSSSSSGRKSGDKRRTKAEKTISLPVLRQYFAGSLKDAAKSIGVCPTTLKRICRQHGITRWPSRKIKKVGHSLKKLQLVIDSVQGAEGAIQIGSFYASFPELSTAAAHGGGGGGGDHINNNSFYNSHGDLVTNLKSPPSACSQTHAAGNKSIINGDHHHHHHHQHLVMTENLAAPSAVDALMQHASTINIQDYQQLQEDHDTKQLLLHFNNNNNNNSNNQTLPPRPTVTWNNNNSSSSGLLERGAFRVKATFADEKIRFSLQAVWCFRDLQLEIARRFNLNDMNNLVLKYLDDEGEWVVLACDSDLEECKDLHTSSHTRTIRLSLFQASPLNNLANSFRNNSSSPSS

SEQ ID NO: 1121 - protein, 407 aa, Oryza sativa
MDALCDFCREQRSMVYCRSDAASLCLSCDRNVHSANALSRRHTRTLLCDRCVGQPAAVRCLEENTSLCQNCDWNGHGAASSAAGHKRQTINCYSGCPSSAELSRIWSFSMDIPTVAAEPNCEEGINMMSINDNDVNNHCGAPEDGRLLDIASTALMSDLPTGDKFKPLIGSSSGDGMNLLPLNSDQPAEPVSTTPKAPCVTDKDMFNDGSVYGDFCVDDADLTFENYEELFGTSHVQTEQLFDDAGIDSYFEMKDVPADESNEQPKPVQPECSNVASVDSGMSNPAARADSSHCIPGRQAISNISLSFSGLTGESSAGYFQDCGVSSMILMGEPPWHPPGPESSSAGGSRDNALTRYKEKKKRRKFDKKIRYASRKARADVRKRVKGRFVKAGEAYDYDPLSQTRSY

SEQ ID NO: 1122 - protein, 218 aa, Glycine max
  misc_feature (32)..(32): Xaa can be any naturally occurring amino acid
MVQTRKFRGVRQRHWGSWVSEIRHPFLKRRVXLGTFETAEEAARAYDQAAILMSGRNAKTNFPILQTPEGDPKTTLTPIDHETSSSSTTTSKELEEILHAKLRKCGKLPSPSMTCLRLDPENSHIGVWQKRAGQRSDSNWVMMVPPLGKKGGANEGGTGGDASCSNSFPFSECDPTPQVARQELLRTEMDEEERIALQMIEELLSRNCPTSPSFNNLY

SEQ ID NO: 1123 - protein, 555 aa, Zea mays
  misc_feature (134)..(134): Xaa can be any naturally occurring amino acid
  misc_feature (373)..(373): Xaa can be any naturally occurring amino acid
  misc_feature (469)..(469): Xaa can be any naturally occurring amino acid
MADTPTSRMVHPFGDVPRQTPKQFLYSGNPQHLCHPYQSAPDTHVVPQRRYTVRSQSHSPNNAGSQDHETHKQYTLESSAASGCSRHGSPSSQSVHAGSGSPVSHDDSHSGSTNGHGSPVSASCVTGEDPTDLXQKLKDLEAVMLGTSETDPEIVNSLEISAANQLSLEPEEWEHMVSMPRGNLKELLIACARAVERYNTYAIDLMITELRKMVSVSGEPLERLGAYMVEGLVARLAASGSSIYKALKCKEPRSSDLLSYMHFLYEACPYFKFGYMSANGAIAEAIKGEDRIHIIDFHIAQGAQWVSLLQALAARPGGPPFVRVTGIDDSVSAYARGGGLELVGRRLTHIAGLYKVPFQFDALAISGSEVRGXHLGVVPGEAVAVNFTLELHHIPDETVSTANHRDRILRLVKGLSPKVLTLVEQESNTNTAPFAQRFAETLDYYTAIFESIDLALPRDDRERINIEQXHCLAREIVNLVACEGEERVERHEVFGKWKARLMMAGFSPSPLSALVNATIKTLLQSYSPDYKLAERDGVLYLGWKNRPLIVSSAWH

SEQ ID NO: 1124 - protein, 857 aa, Oryza sativa (indica cultivar-group)
MATAEVGGGGGEGDAAAAAVARAGGGGGGGGGGEDALFTELWSACAGPLVTVPRVGEKEFYFPQGHIEQVEASTNQVGEQRMQLYNLPWKILCEVMNVELKAEPDTDEVYAQLTLLPELKRQEDNGSTEEEVPSAPAAGHVRPRVHSFCKTLTASDTSTHGGFSVLRRHADECLPPLDMSRQPPTQELVAKDLHGVEWRFRHIFRGQPRRHLLQSGWSVFVSAKRLVAGDAFIFLRGENGELRVGVRRAMRQQTNVPSSVISSHSMHLGVLATAWHAVNTGTMFTVYYKPRTSPAEFVVPYDRYMESLKRNYSIGMRFKMRFESEEAPEQRFTGTIVGMGDSDPAGWPESKWRSLKVRWDEASSIPRPERVSPWQIEPAVSPPPVNPLPVPRTKRLRPNATALPADSSAIAKEAATKVVVESEPNGTQRTFQTQENATPKSGFGNSSELESAQKSIMRPSGFDREKNNTPIQWKLGSDGRMQMSKPESYSEMLSGFQPPKDVQTPQGFCSLPEQITAGHSNFWHTVNAQYQDQQSNHNMFPSSWSFMPPNTRLGLNKQNYSMIQEAGVLSQRPGNTKFGNGVYAALPGRGTEQYSGGWFGLMMPNSHMDDTQPRLIKPKPLVVAHGDVQKAKGASCKLFGIHLDSPAKSEPSKSPSSVVYDGTPQTPGATEWRRPDVTEVEKCSDPSKAMKPLDTPQPDSVPEKPSSQQASSQQASRNMSCKSQGVSTRSCKKVHKQGIALGRSVDLTKFNGYEELIAELDDMFDFNGELKGPKKEWMVVYTDNEGDMMLVGDDPWIEFCDMVHKIFIYTREEVQRMNPGTLNLRSEDSHANSMERGSVGREMRGCLSTSSLNSENC

SEQ ID NO: 1125 - protein, 443 aa, Lycopersicon chmielewskii
RMSVDVGAPSPRSIQMDEQVNPGEEYAPKIRKPYTISKQRERWSEEEHKKFLEALKLHGRAWRRIEEHVGTKTAVQIRSHAQKFFSKVVRESSNGDASSVKSIEIPPPRPKRKPMHPYPRKMATPLKSGTLASEKLNRSGSPDLCLSEPENQSPTSVLSTLGSDAFGTVDSTKPSEQSSPVSSAVAENSGDLVLSEPFDLVVEESRSSPARAYATSNPANQACVKLELFPEDNDFVKEGSDEASSTQCLKLFGKTVLVTDAHMPPTDETLTRSSFPAKYLPWDSECPRSTFSIVPPTPSYYFPTPNGSPGPNQCGAATHLPWGSSCAVPCTQVHSPIPMKGRPLFNDRDLEGKGTQKEGSSTGSNAESVDAEYLEIEAQSSPNVVEELVRVRASVPSLFERRANSTKRVKGFVPYKRCLAERGVSSSTLTGEEREEQRTRLCL

SEQ ID NO: 1126 - protein, 645 aa, Arabidopsis thaliana
MDTNTSGEELLAKARKPYTITKQRERWTEDEHERFLEALRLYGRAWQRIEEHIGTKTAVQIRSHAQKFFTKLEKEAEVKGIPVCQALDIEIPPPRPKRKPNTPYPRKPGNNGTSSSQVSSAKDAKLVSSASSSQLNQAFLDLEKMPFSEKTSTGKENQDENCSGVSTVNKYPLPTKQVSGDIETSKTSTVDNAVQDVPKKNKDKDGNDGTTVHSMQNYPWHFHADIVNGNIAKCPQNHPSGMVSQDFMFHPMREETHGHANLQATTASATTTASHQAFPACHSQDDYRSFLQISSTFSNLIMSTLLQNPAAHAAATFAASVWPYASVGNSGDSSTPMSSSPPSITAIAAATVAAATAWWASHGLLPVCAPAPITCVPFSTVAVPTPAMTEMDTVENTQPFEKQNTALRDQNLASKSPASSSDDSDETGVTKLNADSKTNDDKIEEVVVTAAVHDSNTAQKKNLVDRSSCGSNTPSGSDAETDALDKMEKDKEDVKETDENQPDVIELNNRKIKMRDNNSNNNATTDSWKEVSEEGRIAFQALFARERLPQSFSPPQVAENVNRKQSDTSMPLAPNFKSQDSCAADQEGVVMIGVGTCKSLKTRQTGFKPYKRCSMEVKESQVGNINNQSDEKVCKRLRLEGEAST

SEQ ID NO: 1127 - protein, 369 aa, Picea glauca
MGRAPCCDKMGVKKGPWTLDEDQILVSYINKHGHGNWRALPKQAGLLRCGKSCRLRWTNYLKPDIKRGNFSPEEEDHIIKLNQLIGNRWSTIASHLPGRTDNEIKNVWNTHLKKRLARMKAEAEAESVAVHAQPAPSSSLDSSTAKMAYHGSNPLSSQILCNSDARAPSAWEICDPVYVLPELSEDIISSSYNVCRSTIDDQSTSTDSILDVLHSDCIDSLELEIDHSRLSINTPDELQWQPLSRDLQIFIGNDRNNFEDPAGVPAISQDDKAEMVTSSSQGMRSDCDGEIVISEESSMNLRVDSLVQQLDGAEVDWFLDHLDNMSPAMDSNHLSKNTINLCRTDLEAGDGMDYWLNLLRQVQPLPLFS

SEQ ID NO: 1128 - protein, 499 aa, Picea glauca
MGRAPCCDKDGLKKGPWTPEEDQKLTDYIQRHGHGSWRTLPKHAGLLRCGKSCRLRWTNYLRPDIKRGKFSFEEEQTIVQLHGVLGNKWSAIASHLPGRTDNEIKNYWNTHLKKRLLQMGIDPVTHRPRIDLFNFSNMTQLLAPASLSHMAAQWERARLEAVTTDYLRVLAAYRSAAMMQQASHSQSSTMDADHLMSYLRNQLGDAAFCNMPDNMNSAMAQANWALNSENLGSSDSNALATQIIMEQLQVPAAQIMRNLQIQTQNTAELSACSLPLNGTSMTQHSSPTSTLSSLDGFHTLKAEQRNNNSNKNNVPNSHDSTKINNQALLQDQGYDNLMNASASLVQQHSRSQDNNSLSTDQLVTSPILWPEGQFLGISKNNNSESVPALVSTTSSPNIFNDTSDMFHDASPVQNSQNCMRSDCISTNGYGLPADLFLDFGLETTKQQNVETMAPATSTTHVISGSSSWSEMQNSHEDGGDYWSNMLKYVGESSISNSTL

SEQ ID NO: 1129 - protein, 346 aa, Medicago truncatula
MDHGDHMALSNSASYYMQQRVLPGSGAQPELHVSPSFNQLSNPNLPFQSNIGGGGSNIGTTLPLESSAISSQGVNMSGHTGVPSGETVKRKRGRPRKYGADRVVSLALSPSPTPSSNPGTMTQGGPKRGRGRPPGSGKKQQLASFGELMSGSAGTGFIPHVIEIASGEDIAAKILTFSQVRARALCVLSSSGSVSSVIIREPSISGGTLKYEGHFHIMSMSGCYVPTENGSSRNRDGGLSISLLGPDGRLFGGAVGGPLVAASPVQVMIGSFLWGRLKAKNKKKESSEDAEGTVESDHQGAHNPAALNSISPNQNLTPTSSLSPWSAASRQMDMGNSHADIDLMRG

SEQ ID NO: 1130 - protein, 211 aa, Glycine max
MSSTTTDSDCSYLEQIQQYLLHNDSTILTPPQAFPSPSHDSSSDASVHFEHPSEAHDVNAPPKWRRYRGVRRRPWGKFAAEIRDPKKNGSRVWLGTYVNEEEAALAYDKAAFNMRGQKAKLNFPHLIGSAVQPEPPCLAVSKRSLPESSPPTSPYDSCESKGSKRRKSLVDLLNNLAKNKSQAKVVEMALEANEVEQWVNELNDCTLFWCS

SEQ ID NO: 1131 - protein, 526 aa, Picea glauca
MGRHSCCYKQKLRKGLWSPEEDEKLVRHITKYGHGCWSAVPKQAGLQRCGKSCRLRWINYLRPDLKRGTFSPQEENLIIELHAVLGNRWSQIATHLPGRTDNEIKNLWNSCIKKKLRQRGIDPSTHRPLSEVNAEAGDSKNDNSNKKIETQAVMDESHVSAGNEFKHPNAIPRAETANPKFFHVPVEDNNLIASDSQAMLHNGFINSNSTTITATSTASAANISLPKEFFLERFNSVNATPTSVEPGFNFINQTSCTQGFTAERDHKLIDNPVLWVLQAPSRSVGFPTENLMPWPGQVPAKAVSDAFSDFSSDVCDYNSIMANPSMYRPGPCLSSLLYSERSLDQDLLDNAGTNCMNGSAVGSAQYWDNTENNNVRTSSRSSSCNSSTANLEVNNGAAFGHFWGFGERLDATDITSENERKAPLFLERAETEYAVKWSEMLPPFSSHTQEETLPMYITTDSKSQDLVSSDNINNHNQGALNSAIFPISWQQLQNTEYPVLGDRTTMLSTPLSDPDFHRIAAVLDQI

SEQ ID NO: 1132 - protein, 185 aa, Zea mays; identical to SEQ ID NO: 133

SEQ ID NO: 1133 - protein, 395 aa, Zea mays
GDGQLHGLKFGKKIYFEDAGGSSSSGGSGSASATAPPATQQPSPPAASPRAAPTKQAGNPHKAADGSARWRWPARCQVDGCNVDLTDVKPAYYCRHKVCKMHSKEPRVLVNGLEQRFCQQCSRFHQLPEFDQLKKSCRKRLAGHNERRRRPPPGPLASRYGRHAASLGEPGRLRSFMLDFSYPRVSSAMRGGFPAVRPGGERVPGGIQWQAGLDPRHHQGAVAGYGAHYGSEGGSSSSARPPVFPGPELPPGGCLAGVPADSSCALSLLSTQPWDAAHSHSHSHAAPTAGFDGGSPVAPSLMAASSYIAPSPWTETDSWGHEGGRSVPQLPPDDVPLGEVHSGSSSHHGQFSGELELALQGNRPAPGSAAPPAPRNNQGSAGTFDQAGNTMDWSL

SEQ ID NO: 1134 - protein, 678 aa, Arabidopsis thaliana
MASSEVSMKGNRGGDNFSSSGFSDPKETRNVSVAGEGQKSNSTRSAAAERALDPEAALYRELWHACAGPLVTVPRQDDRVFYFPQGHIEQVEASTNQAAEQQMPLYDLPSKLLCRVINVDLKAEADTDEVYAQITLLPEANQDENAIEKEAPLPPPPRFQVHSFCKTLTASDTSTHGGFSVLRRHADECLPPLDMSRQPPTQELVAKDLHANEWRFRHIFRGQPRRHLLQSGWSVFVSSKRLVAGDAFIFLRGENGELRVGVRRAMRQQGNVPSSVISSHSMHLGVLATAWHAISTGTMFTVYYKPRTSPSEFIVPFDQYMESVKNNYSIGMRFKMRFEGEEAPEQRFTGTIVGIEESDPTRWPKSKWRSLKVRWDETSSIPRPDRVSPWKVEPALAPPALSPVPMPRPKRPRSNIAPSSPDSSMLTREGTTKANMDPLPASGLSRVLQGQEYSTLRTKHTESVECDAPENSVVWQSSADDDKVDVVSGSRRYGSENWMSSARHEPTYTDLLSGFGTNIDPSHGQRIPFYDHSSSPSMPAKRILSDSEGKFDYLANQWQMIHSGLSLKLHESPKVPAATDASLQGRCNVKYSEYPVLNGLSTENAGGNWPIRPRALNYYEEVVNAQAQAQAREQVTKQPFTIQEETAKSREGNCRLWHSSDQQHEWDRLNHVSEKQLE

SEQ ID NO: 1135 - protein, 326 aa, Nicotiana tabacum
MELIEARALKSSFLSDMAMKTSQQVFLDDIWCVAGINNVPSDDFSVDDLLDFSDKDFKDGQSLQELHEDDEKDSFSGSSQHRNSQVSNFSCMDSFSGELPVPVDELENLEWLSQFVDDSTSEFSLLCPAGSFKDKTGGFQVSRSEPVVRPVVQKLKVPCFPLPVVQKPRTYRSRPAGRKWSFSSPTVSADSCSPTSSSYGSSPFPSVLFSNPVLDGDLFCSVEKPPLKKPKKLSTAETGSGRRCTHCQVQKTPQWRAGPLGPKTLCNACGVRYKSGRLFPEYRPACSPTFSQEVHSNSHRKVLEMRRKKESGEVVDSGLATMISTC

SEQ ID NO: 1136 - protein, 117 aa, Brassica napus
MEKEKEEEGSHHRICDYCESSVALVYCKADSAKLCLACDNQVHVTNQLFSKHFRSLLCDSCDDSPSSVFCDTESSVLCQNCDWQHHTSSSSLHSRRPLEGFSGCPSVTELLALVGLD

SEQ ID NO: 1137 - protein, 417 aa, Oryza sativa
MGSRGDHGGGGGGRGAARATQLKVLVPSSFRKMRICDELAAQLGVGVGGGGAPRAATARVASPLGKAWDVGVVRDGDGRAFLGRGWAEFAAAHGLGVGWFVVLRHGGGVLAVEAFDTTCCLRVFGAPPAEAGRATDTSRKPQFLTVLLPGIMDKMRIPDKFVRDYITGENLNSNMAIILSPLGKSWRVELDKDQSGVFLGGGWLQFLSFHGISRGDVVIFSVFGPNGRQKDFKAKGISIYQGTGEQQEAPSFSRRKCNNKKKSRFGEDDGNQQEMPCSRKGSGNKGRTSDRETKRMRKTRSVYEIGPRSWIKKEINEYVLERCILSLARTFCESIGLVEESSITLMMIDTTSTQGDQGGSSSSSRSWEVTGRRYKDACYLLGAGWRRFCEDNGVRSGDVCVFTVLDTTLWRVDIERC

SEQ ID NO: 1138 - protein, 318 aa, Medicago truncatula
MVRPPCCDKEGVKKGPWTPEEDIILVSYIQEHGPGNWKAVPTNTGLLRCSKSCRLRWTNYLRPGIKRGNFTDQEEKMIIHLQALLGNRWAAIAAYLPQRTDNDIKNYWNTYLKKKLKKLETSTSSESCLGHDEFSVSQPIARGQWERRLQTDIHMAKKALSEALQPEKSTSSSNLMLPLESNFSSESSFCSTKPTTQSLSYASSADNIARLLKGWMKNKPKEGSNGNNTNVTQNYETSASSEGMEKGSTSVELSETFESLFGYESFDSSNSDSTTLFQDESKPENIGEIMPFSMLEKWLLDDGACQEKVGLSEINYIF

SEQ ID NO: 1139 - protein, 140 aa, Brassica napus
KRLVAGDAFVFLRGHQTGDLRVGVRRLAKQQSTMPASVISSQSMHLGVLATASHAFNTTTMFVVLYKPRISQFIISVNKYMAAMKKGFGIGMRFRMRFEGEESPERIFTGTIVGTGDLSPQWPSSKWRSLQIQWDEPSTV

SEQ ID NO: 1140 - protein, 149 aa, Triticum aestivum
  misc_feature (98)..(98): Xaa can be any naturally occurring amino acid
  misc_feature (110)..(110): Xaa can be any naturally occurring amino acid
  misc_feature (126)..(126): Xaa can be any naturally occurring amino acid
  misc_feature (131)..(131): Xaa can be any naturally occurring amino acid
  misc_feature (137)..(138): Xaa can be any naturally occurring amino acid
  misc_feature (141)..(141): Xaa can be any naturally occurring amino acid
IQTEELFDDAGIDSYFEVKEATAVNSDEQPKPKQPAASNALSADSGMSNPAVKEDDSSLCIPVRQAISYSGFTGESIPEEYQDCGVSPMLLMGEPPWXPPGPDGSFAGNXRDSAITRYKEKKKRRXFDHKXSMNSQXXGGXRKRSRDVC

SEQ ID NO: 1141 - protein, 447 aa, Lycopersicon pimpinellifolium
RMSVDVGAPSPRSIQMDEQVNPGEEYAPKIRKPYTISKQRERWSEEEHKKFLEALKLHGRAWRRIEEHVGTKTAVQIRSHAQKFFSKVVRESSNGDASSVKSIEIPPPRPKRKPMHPYPRKMATPLKSGTLASEKLNRSGSPDLCLSEPENQSPTSVLSTLGSDAFGTVDSTKPSEQSSPVSSAVAENSGDLVLSEPFDLVVEESRSSPARAYATSNPANQACVKLELFPEDNDFVKEGSDEASSTQCLKLFGKTVLVTDAHMPPTDETLTRSSFPAKYLPWDSECPQSTFSIVPPTPSYYFTTPNGSPGPNQSGVATTHLPWGSSCAVPCTQVHSPIPMKGRPLFNDRYLEGKETQKEGSSTGSNAESVDAELSGEKNMEIEAQSSRNVVEESVRASVPSLFERRANSTKRVKGFVPYKRCLAERGVSSSTLTGEEREEQRTRLCL

SEQ ID NO: 1142 - protein, 511 aa, Glycine max
EFGSSDMDGFKLLEHVGLEMDLPVIMMSVDGETSKVMKGVQHGACDYLLKPIRMKELRNIWQHVFRKKIHEAKEFESFESIHLMRNGSELSDDGNLFAVEDVTSSKKRKDADSKHDDKECLDPSSTKKARVVWSVDLHQKFVKAVNQIGFDKVGPKKILDLMNVPWLTRENVASHLQKYRLYLSRIQKENDQRSSSSGMKHSDFPSKDMGSFGFQNSVIKQQNDVAIDNYNHSDGSLQLQNVETKSHEADPKGIVSQSTIAKKGRILTGNIADTNMRESLRVGLNQTFPPLESEGNHAVFDCSMPTPYSWTEVPHMQLKEEHKSLVYLEDSFNQLPLHGKQQQHIHVDQSQSVASISSAPSITEEEAAACIEPKPLFADYNNDYASSVSSTGNAVATFPIQPGSLIMNGQSSERISTTTSGLKTQEYNNLSSISDQEIYQRNLLGCEAASASLDEDLHFYWLEGECYNNMNFGLQNIGMSEYYDPGLISEAPIHLYDSADYSVMDQGLFIA

SEQ ID NO: 1143 - protein, 250 aa, Cynodon dactylon
MERVEVLGGGSSAGQVRKKRMRRKSTGPDSIAETIKRWKEHNQKIHEDRKAPAKGSKKGCMAGKGGPENGNCAYRGVRQRTWGKWVAEIREPNRGRRLWLGSFPTALEAAHAYDEAARAMYGPTARVNFSESSADANSGCTSALSLLASNIPPASQRSDDKDEVESVETEVHEVKMEVNDDMRSVHVERKTLEVFQSEESVLRKEGDVSYDYFHVEDVLEMIIVELNAAKKIEVHEEYQDGDDGFSLFSY

SEQ ID NO: 1144 - protein, 250 aa, Cynodon dactylon
MERVEVQGGASSAGQVRKKRMRRKSTGPDSIAETIKRWKEHNQKIHEDRKAPAKGSKKGCMAGKGGPENGNCAYRGVRQRTWGKWVAEIREPNRGNRLWLGSFPTALEAAHAYDEAARAMYGPTARVNFSESSADANSGCTSALSLLASNIPPASQRSDDKDEVESVETEVHEVKMEVNDDMRSVHVERKTLEVFQSEESVLRKEGDVSYDYFHVEDVLEMIIVELNAAKKIEVHEEYQDGDDGFSLFTY

SEQ ID NO: 1145 - protein, 148 aa, Brassica napus
RRRDRINERMKALHELIPHCTKTDKASILEEAIDYLKSLQLQLQVMWMGSGMAGAAATPIMFPGVQPPPPFIRQVQSPVLLPRFPVMDGSAIQNNPGLVCQNPVQSQVFPDRFGRYVGLFPRMQGTSQPMEIMTFGFCHPSSYSIFRP

SEQ ID NO: 1146 - protein, 271 aa, Triticum aestivum
MLLLNPASEAAAAALDSIRQQLLEEPMAPARPAYCRSASFGSLVADQWSESLPFRPNDADDMVVYGALRDAFSCGWLPDGSFAAVKPEPLPSPDSYDGCCLGSFLASPPGLDAPWAEEAEVAATASRGKHFRGVRQRPWGKFAAEIRDPAKNGARVWLGTFDSAEDAAVAYDRAAYRMRGSRALLNFPLRIGSEIAAAAGQKRPSPQPASPDSPPPSSSAPGSSKRRKRGEAAAESMSMALVPPPPVQAPVQLTLPVQPWLATGAVQQLVS

SEQ ID NO: 1147 - protein, 476 aa, Oryza sativa
MDDLAAASPPHPPPPPPESHVPPPPQTPEKDSCEDTGDMRISEEKPCTDQELDADQMNSSSFNSSSECENQTPSNDEMTGSESKSEAAQTEGGGSSEEKVLKKPDKILPCPRCNSMDTKFCYYNNYNINQPRHFCKSCQRYWTAGGSMRNLPVGAGRRKSKSSTANYRSILITGSNLAAPAGDAPLYQLSIKGDQTATAVKFAPDSPLCNSMASVLKIGEQSKNAKPTSTAQPRNGETQTCPASGTTSDSPRNEPVNGAVSGHQNGIVGHSGVPPMHPIPCFPGPPFVYPWSPAWNGIPAMAPPVCTAPAEPANSSDNGSTASVQWSMPPVMPVPGYFPVIPSSVWPFISPWPNGAWSSPWIQPNCSVSASSPTSTSTCSDNGSPVLGKHSRDSKPQGDDKAEKNLWIPKTLRIDDPDEAAKSSIWTTLGIEPGDRSMFRSFQSKPESREQISGAARVLQANPAALSRSQSFQETT

SEQ ID NO: 1148 - protein, 232 aa, Medicago truncatula
MRIARKCSYCGNFGHNSRTCNNSLKEQFHLYSSSPSYLPTKRSIRKNYLPSSRTSLSIASSWPTLFGSNENSDSCVRNWHTSTIRPSKKGMPWTEEEHMIFLRGLEKLGKGNWRGISRDFVTTKTPTQVASHAQKHFLRQSQNSLVNRRKHHLSLHNVGCEKPGINLTPNDISCISQLSGSRNFLSQLLSHPQHSMLKWPNSSTSTNCTPHSAAPDLELKLATPMPLEPTSP

SEQ ID NO: 1149 - protein, 368 aa, Zea mays
MVVKEFGREVVMSMDKVKRGGEALMAAGAGAGDEEKDDAVLPGFRFHPTDEELVTFYLRRKVARKPLSMEIIKEMDIYKHDPWDLPKASTAAGGEKEWYFFCLRGRKYRNSIRPNRVTGSGFWKATGIDRHIYPATANPVESVSVGLKKSLVYYRGSAGKGTKTDWMMHEFRLPPAAASPSPTPTSMQEAEVWTICRIFKRNIAYKRQPQLPAWRQQQQSSSNTGSFESDGGGGGDEYMNRCLPVPATATATAHQIGGMLNGGGVVSATGSSSSSFFRDRESVHGGQQFHFHEQWLSRFPAAPAVEQKPQLLDPSAMAIAFHQNDDQSVATAAAAAASECCKDGYYWDEIARFMEVNDPTVLHDCRYA

SEQ ID NO: 1150 - protein, 364 aa, Arabidopsis thaliana
MEPKCDHCATSQALIYCKSDLAKLCLNCDVHVHSANPLSHRHIRSLICEKCFSQPAAIRCLDEKVSYCQGCHWHESNCSELGHRVQSLNPFSGCPSPTDFNRMWSSILEPPVSGLLSPFVGSFPLNDLNNTMFDTAYSMVPHNISYTQNFSDNLSFFSTESKGYPDMVLKLEEGEEDLCEGLNLDDAPLNFDVGDDIIGCSSEVHIEPDHTVPNCLLIDKTNTSSFTGSNFTVDKALEASPPGQQMNINTGLQLPLSPVLFGQIHPSLNITGENNAADYQDCGMSPGFIMSEAPWETNFEVSCPQARNEAKLRYKEKKLKRSFGKQIRYASRKARADTRKRVKGRFVKAGDSYDYDPSSPTTNN

SEQ ID NO: 1151 - protein, 271 aa, Antirrhinum braun-blanquetii
HLPQVSSSLHSRAATSVVDLNGNEIQLHDMLSGHYLTTANAPVLESTALFNNNSNFNHDVVNGLNRDPSPTFPTKQAVKKDRHSGIYTSQGPRDRRVRLSIGIARKFFDLQEMLGFDKPSKTLDWLLTKSKTAIKELVQSKSTKSNSSSPCDDCEEVVSVESENVTDHSKGKSLKANNKSKEAMDSHQAAAKESRAKARARARERTKEKMCIKQLNEAIVLRNHQFEVSGTREAFVHPVFGFHQQNYGNTSHENWDQSNFASQSNQLCAIL

SEQ ID NO: 1152 - protein, 158 aa, Beta vulgaris
MRVESTWPDEGVVSSDEDYSGGEIDVQDLQPKDEERDLKDQLLRRFGSHISSLKLEFSKKKKKGKLPREARQMLFEWWNAHYKWPYPTLAWTYVSIISQHPAIAVQEADKIALAEMTGLDQRQINNWFINQRKRHWKPSENMQYALMENFSGQYFTDD

SEQ ID NO: 1153 - protein, 614 aa, Glycine max
MMMFEDMGFCGDLDMLCVSLGEGDIAVRQTEPDPVVEDDYSDEEIDVDELEKRMWRDKMRHKRLKEQTKSKEGTDATKQRQSQEQARRKKMSRAQDGILKYMLKMMEVCKAQGFVYGIIPEKGKPVTGASDNLREWWKDKVRFDRNGPAAIVKYQADNAIPGKNDGCNSIGPTPHTLQELQDTTLGSLLSALMQHCDPPQRRFPLEKGVPPPWWPTGNEEWWPQIGLPKDQSPPPYKKPHDLKKAWKVGVLTAVIKHMSPDIAKIRKLVRQSKCLQDKMTAKESATWLAIINQEEALARELYPDYCPPFSSAGGNGSLVINDCSEYDVDGAEEELNFDVEDRKPDHLLPSNLGMERMRGRMPIQQPSHPMKGDVVTNLDFIRKRKISSDFNMMMDQKIYTCEHPQCPYSEVRLGFHDRSARDNHQLNCAYRNSSADYGGGPNFHATEDKPVIFPQSFVQPNTTTQSASLVAPSFDLTGLGVPEDGQKMISDLMTIYDTNVVGNKNLSSSNCVAVENHNLSQASLQQQESYFPGQGMVLEGNFFAREEGQFDRFKATMNMNTHTPFDTNHSNNNNIHLMFNSPCDLSSFDFKEDIQGGVGMDPLHKQQEVSIWYQ

SEQ ID NO: 1154 - protein, 217 aa, Zea mays
MGRPPCCDKMGVKKGPWTPEEDLMLVSYVQEHGPGNWRAVPTNTGLMRCSKSCRLRWTNYLRPGIKRGNFTEQEEKLIVHLQALLGNRWAAIASYLPKRTDNDIKNYWNTHLKKKLKNMQGGEGGAGGKRPAVPKGQWERRLQTDIHTARQALRDALSLEPSATPLAKVEPLPTAPGCATYASSADNIARLLEGWLRPGSGKGPEASGSTSTTATTR

SEQ ID NO: 1155 - protein, 447 aa, Lycopersicon pimpinellifolium
RMSVDVGAPSPRSIQMDEQVNPGEEYAPKIRKPYTISKQRERWSEEEHKKFLEALKLHGRAWRRIEEHVGTKTAVQIRSHAQKFFSKVVRESSNGDASSVKSIEIPPPRPKRKPMHPYPRKMATPLKSGTLASEKLNRSGSPDLCLSEPENQSPTSVLSTLGSDAFGTVDSTKPSEQSSPVSSAVAENSGDLVLSEPFDLVVEESRSSPARAYATSNPANQACVKLELFPEDNDFVKEGSDEASSTQCLKLFGKTVLVTDAHMPLTDETLTRSSFPAKYLPWDSECPQSTFSIVPPTPSYYFTTPNGSPGPNQSGVATTHLPWGSSCAVPCTQVHSPIPMKGRPLFNDRYLEGKETQKEGSSTGSNAESVDAELSGEKNMEIEAQSSRNVVEESVRASVPSLFERRANSTKRVKGFVPYKRCLAERGVSSSTLTGEEREEQRTRLCL

SEQ ID NO: 1156 - protein, 280 aa, Brassica napus
  misc_feature (155)..(155): Xaa can be any naturally occurring amino acid
  misc_feature (259)..(259): Xaa can be any naturally occurring amino acid
YASSSVRIPGRPTRPEGCRMDLSNAKTYYSRHKVCCIHSKSSKVIVSGLHQRFCQQCSRFHQLSEFDLEKRSCRRRLACHNERRRKPQATTTLLTPHYSNIAPSLYGNAIRSVLGDPTRWSTTRGSAPWQSHQLMNVFPYGNSSFTNSTDSSCAXLSLLSNYTNPNQQEQQPLQTPTNTWRPSSIAADRVTMAQTPPVSIQNQYLNQTWEFMSGEKSNAHYTTPVLELSQISEPVDFQISNGATMGGFELSPHQQVLRXYLEPENTRAYDSSPQHFNWSL

SEQ ID NO: 1157 - protein, 438 aa, Pinus radiata
MVLENFGGVGAREASCRIRHELRGIGGWRMSMPKLCDVCQVSSSVIYCRAHTAQLCLVCDAKIHGGSKASLCHERVWVCEVCEQAPAVVTCKADAAALCVACDTDIHSANPLASRHERAPVIPFYECPNMPTNNTVTHANNDNLDCNVLLNEDGGGDDPLKHDYVDDDYGDYDDDENDQNNLLNNQEDNNDAEICCAEEAATASWLIPEANRNNLTIINGGNSEGEDKMVKDKLKFKAYMQSMDFLQDVDNYADLEYLGTTTITTPINPTANMGADSMVPVHTPEVIEHSSTKVSIDTAGSMDVDAASKCNHVYRTTSLNHCVSSSPIDVGIVPDSNITSDISTPYHDPRGVFEIPPRVVHPGGQGEVMGREARVLRYREKRKNRRFEKTIRYASRKAYAETRPRIKGRFAKRTEVEVEQIYSSSLLPDQGYGVVPSY

SEQ ID NO: 1158 - protein, 217 aa, Ophioglossum pedunculosum
RSGLLKKAYELSVLCDAEVALIIFSGTGKLFEFASSSMKKILERYRKYGGGLHDNSIATRDAEYWRNEVMRMKEHIACLEESQRHLLGENLVSLSVKNLQKLEHQLEIGANRIRTRKTQILLEQIQELQKKEHFLHGENNILKTKLEQLSTRQVPSLGTLIYTSTVTTTSTTSAGAGVEDNAGGHDSMNAMQKMTLHSNFQPATSAQNTLQLGYYPD

SEQ ID NO: 1159 - protein, 239 aa, Zea mays
  misc_feature (13)..(13): Xaa can be any naturally occurring amino acid
MQEASSAAAAGAXEPGRRAAQHQFAGVDLRRPKGYAAPAPAPAVGEGDPCPRCASRDTKFCYYNNYNTSQPRHFCKGCRRYWTKGGTLRNVPVGGGTRKKPSSSSSSSSYVAAADADRQPKKKPASKKRRVVAPAPELATAADPGKTATTTTTTSEITTETGALEDSDSLAHLLLQPGTEDAEAVALGLGLSDFPSAGKAVLDDEDSFVWPAASFDMGACWAGAGFADPDPACIFLNLP

SEQ ID NO: 1160 - protein, 215 aa, Hyacinthus orientalis
HVEFEYRGFVANSLADLEPYLLESAPNPRNGPDEIEAVAVNSIFELHRLLAREGAIDKVLSTVKAIKPKIMTVVEQEANHNGGLFAERFTEALHYYSTMFDSLEGGASADAVSGGQQNQVMSEVYLGRQICNVVACEGAERTERHETLVQWRNRLSPAGFEPVHLGSNAFKQASMLLALFAGGNGYRVEEKDGCLTLGWHTRPLIATSAWRVADA

SEQ ID NO: 1161 - protein, 663 aa, Daucus carota
MKGEHGDVDEVMEAFGEEIWRGSEESSIFCDVFPALPDFPCMSSTSSSSSNPALNRQFVSSSASSGCSASSSVVVKSDGNLRSVKYEVDVSSALSSTDCMGVMEEFGYMDLIEDGNEGWDPSSIFRNDDESNVGEELIDQGGFKEEERVEEEMGLDELGVMFFEWLKTNKEHISAEDMKNIRFKKSTIECAYKRMGSSKEGKKQLLKLILEWVEQYQLQKKRSREAAEAAAEAATSHQVPCLYQEPNPNPNPNSNFVNFMPTPGANACMWIPTPQSSSIDPLAVVPSGPAPPAVAYYQPYPFVGGANVGPVNCQPYPPQMPQPEYQMLESPQLWPRSQFVLAPQYNSLPDQNGNFVPIAPHPVAPVYGGQYPSQVYNGSNSDRVVRLAPSATKEARQKRMARKRWGSFHRNQPHQNQIQKTDSPEQISEKKLGAENFTNSINGQSSPVNWLYWPAVGPPKLAQPPMAAQSQQPDQYQQGYPTFLPVKAQSNRRPAQQQQKKQGFKGEKNLKFLLQKVLKQSDVGCLGRIVLPKREAETQLPQLEDRDGIQIVMEDIGTSKVWNLRYSLRYWPNNKSRMYVLENTGEFVKENGLQEGDFIVIYSDIKCGKYLIRGVKVRQPVKGKLEAKVTRKHHSNSGAGTDIPQNHSNSGAGTDIPPYTPSN

SEQ ID NO: 1162 - protein, 925 aa, Oryza sativa
MAAAATAAASPVEGLTGGGGGGGGGVDGLFVELWRACAGPLVTVPAVGERVFYLPQGHIEQVEASTNQVAEQQGAPLYNLPWKIPCKVMNVELKAEPDTDEVYAQLTLLPEKQQDGNGSGNGNVSKDKVEEEEVVPPAATERPRVHSFCKTLTASDTSTHGGFSVLRRHADECLPPLYSFFDRLIVAMPLTSLLDQDMSQHPPTQELVAKDLHGVEWRFRHIFRGQPRRHLLQSGWSVFVSAKRLVAGDAFIFLRGENGELRVGVRRAMRQQANIPSSVISSHSMHLGVLATAWHAVNTGTMFTVYYKPRTSPSEFVVPRDLYKESLKRNHSIGMRFKMTFEGEEAAEQRFTGTIVGVGDSDPSGWADSKWRSLKVRWDEAASVPRPDRVSPWQIEPANSPSPVNPLPAPRTKRARPNVLASSPDLSAVNKEVASKVMANSQQNGLPRAFHSQENMNLRSRFGDSNELNTSQKLTMWSSGSNQEKNNVSVQRELGSQSWMQMRRPDGSSEILSGFQPLKDTRNPLSSFPSQISGNRSNTWNTINVHYPDQNANHNMYPGTWSLMPPNTGFGVNQQNYLMTPDITLPQRSLNAKFGGNGAFTSLRAHGIDQRSSGWLGHIEPSSHIDDASSSLIKPQPLVIDHNVQKAKGSSCMLFGISLDSPAKPELLISPPSVAFDGKLQQDALEEDECSDPSKTVKPLDGAQHDSAREKHQSCPDGTKNIQSKQQNGSSRSCKKVHKQGIALGRSIDLTKFTCYDELIAELDQMFDFNGELNSSSKNWMVVYTDNEGDMMLVGDDPWNEFCNMVHKIFIYTREEVQKMNPGALNSRSFVVCKNRRRHIHGRKESFRGVVVVAGALYVSGKPRSTPFVDGACPGISCPLFVFDKFWVCFVEVLSYCMICPVVVKGAEAKLPRPVRLLACALPPS

SEQ ID NO: 1163 - protein, 248 aa, Hordeum vulgare subsp. vulgare
AFGDGMGWDDEDELDQQSMDASSLGVSASLENAAVGAPGGGGGGGNGKGKKKGMPAKNLMAERRRRKKLNDRLYMLRSVVPKISKMDRASILGDAIDYLKELLQRISDLHSELESAPSSAALGGPSTANTFLPSTPTLQPFPGRIKEERCPPAPFPSPSGQQATVEVRMREGQAVNIHMFCARRPGILLSTMRALDSLGLDIEQAVISCFDGFAMDVFRAEQCREGPGLLPEEIKAVLLHCAGLQNAM

SEQ ID NO: 1164 - protein, 192 aa, Hordeum vulgare subsp. vulgare
KNLMAERRRRKKLNDRLYMLRSVVPKISKMDRASILGDAIDYLKELLQRISDLHSELESAPSSAALGGPSTANTFLPSTPTLQPFPGRIKEERCPPAPFPSPSGQQATVEVRMREGQAVNIHMFCARRPGILLSTMRALDSLGLDIEQAVISCFDGFAMDVFRAEQCREGPGLLPEEIKAVLLHCAGLQNAM

SEQ ID NO: 1165 - protein, 720 aa, Zea mays
MEVNSSGEETVVKVRKPYTITKQRERWTEAEHKRFLEALKLYGRAWQRIEEHVGTKTAVQIRSHAQKFFTKLEKEAMNNGTSPGQAHDIDIPPPRPKRKPNSPYPRKSCLSSETQTKELPNDKSTKPNMPLSNGHVKMVGDASLQNFQRKELSEKGSRSEVLNLFRDAPSASFSSVNKSSSNHGAPRRTEASKTESRDMSIMENNSFNPNTQEDVKVISDQEMERLNGIQIRSKCEHSHEGYLDISTQQMKLMPKSVETTYVDEQTARASHTLAESDGTASIPVTVPEGTHPDQTSDQVGINGSMNPCIHPMVSADPKFGSSATPQTFPHNYAAFAPMMQCNCNQDTYRSFTNMSSTFSSMLVSTLLSNPAIHAAARLAASYWPAAEGNTPIDPNQENPADGVQGRNIGSPPSMVSIVAATVAAASAWWATQGLLPFFAPPVAFPFVPAPSAAFPTVDVPRPSEKDRDCPAENAQIECQEARKQVQFEGLRIAASSESDGSGKGEVSLHTELKLSPAQNADATPTTGAGTNDAFRNKKKQDRSSCGSNTPSSSDVDAGNVPEEDNANEKAKQASCSNSSAGDTNHRRFRSNGSTSDSWKEVSEEGRLAFDALFSREKLPQSFSPPQAVDSKEVAKEEEDEVTTVAVDLNKNATSIDHDDLDTMDEPRASFPNELSHLKLKSRRTGFKPYKRCSVEAKENRVPASDMVGTKRIRLDSEAST

SEQ ID NO: 1166 - protein, 271 aa, Antirrhinum valentinum
HLPQVSTSLHSRAATSVVDLNGNEIQLHDMLSGHYLTTANAPVLESTALFNNNNNFNHDVVNGLNRDPSPTFPTKQAVKKDRHSGIYTSQGPRDRRVRLSIGIARKFFDLQEMLGFDKPSKTLDWLLTKSKTAIKELVQSKSTKSNSSSPCDDCEEVVSVESENVTDHSKGKSLKANNKSKEAMDSHQAAAKESRAKARARARERTKEKMCIKQLNEAIVLRNHQFEVSGTREAFVHPVFGFHQQNYSNTSHENWDQSNFASQSNQLCAIL

SEQ ID NO: 1167 - protein, 271 aa, Antirrhinum valentinum
HHPQVSTSLHSRAATSVVDLNGNEIQLHDMLSGHYLTTANAPVLESTALFNNNNNFNHDVVNGLNRDPSPTFPTKQAVKKDRHSGIYTSQGPRDRRVRLSIGIARKFFDLQEMLGFDKPSKTLDWLLTKSKTAIKELVQSKSTKSNSSSPCDDCEEVVSVESENVTDHSKGKSLKANNKSKEAMDSHQAAAKESRAKARARARERTKEKMCIKQLNEAIVLRNHQFEVSGTREAFVHPVFGFHQQNYGNTSHENWDQSNFASQSNQLCAIL

SEQ ID NO: 1168 - protein, 247 aa, Petunia inflata
MVFPNQEFESSSSQRKSGRGKIEIKRIENTTNRQVTFCKRRNGLLKKAYELSVLCDAEVALIVFSSRGRLYEYANNSVRATIDRYKKHHADSTSTGSVSEANTQYYQQEAAKLRRQIRDIQTYNRQIVGEALSSLSPRDLKNLEGKLEKAIGRVRSKKNELLFSEIELMQKREIEMQNANMYLRAKIAEVERATQQMNLMPGGGSEYQQQPMSSTSQPYDARNFLPVNLLEPNPHYSRQDQTALQLV

SEQ ID NO: 1169 - protein, 493 aa, Oryza sativa (japonica cultivar-group)
MDTFPFQWPMDPAASSGLDAGFLPPPAAVAPDDGVGYYDPPAGADVDAAALPEFAAAFPPCAPDAAAAVLAMRREEEEVAGIRLVHLLMSCAGAIEAGDHALASAQLADSHAALAAVSAASGIGRVAVHFTTALSRRLFPSPVAPPTTDAEHAFLYHHFYEACPYLKFAHFTANQAILEAFHGCDHVHVIDFSLMQGLQWPALIQALALRPGGPPFLRITGIGPPSPTGRDELRDVGLRLADLARSVRVRFSFRGVAANSLDEVRPWMLQIAPGEAVAFNSVLQLHRLLGDPADQAPIDAVLDCVASVRPKIFTVIEQEADHNKTGFLDRFTEALFYYSAVFDSLDAASASGGAGNAMAEAYLQREICDIVCGEGAARRERHEPLSRWRDRLTRAGLSAVPLGSNALRQARMLVGLFSGEGHSVEEADGCLTLGWHGRPLFSASAWEAAGDGGGDNNNNSNSNVSGSSGSDSNNSGSSNGKSSGARDGSSVCL

SEQ ID NO: 1170 - protein, 593 aa, Oryza sativa
MMGAAVTMVDRRMAFAAEADVDSKAAFGFFGGECFVGEGDLVNPAPPPPQQQQVHEGGFAAEDESDGDDDDDDDDDVDDIEELERRMWRDRVRHKRLKELQQSRAGRESRAGDAGGGGRQQRQSQEQARRKKMSRAQDGILKYMLKMMEVCNAQGFVYGIIPEKGKPVSGASDNLRSWWKEKVRFDRNGPAAIAKYQADNAVPGCDGDAGGAAPAGPHSLHELQDTTLGSLLSALMQHCDPPQRRFPLEKGVPPPWWPEGSEAWWPEAGVPKELGPPPYKKPHDLKKAWKVAVLTAVIKHMSPDVDKVRRLVRQSKCLQDKMTAKEIVTWLAVLKQEEDLYLKLHPGALPPPLSAASFNASVSGEYDVEGVDGDEAGNNNLQKAQNDATAFMDLTTTMDAALSNNKFLIMPLMKEEAIDVDFIQKRSEPELMLSSDSHARVYTCGNVQCPHSNYALGFLDRNERNAHQYACKHNAAAAAAESKPPPPHIFEPLGSFDFDLPVDGQRCLAGLMTMYDNDVAAATQMHHHHHQQQQANFFIRDDAPFGGDVAATAAAALEFRFSSNFNVTGGGAVDYGGAMQQPPAKYAGSNWFY

SEQ ID NO: 1171 - protein, 2621 aa, Arabidopsis thaliana
MSDLTPSSQKRGSVLRTKFSSLNSNKEESISSEHRLVTLTLTHENLKACKLDRFSRTLIGSGEERDGVYYLTDVATAKIHTAKVSSDQALWHQRLGHPSFSVLSSLPVLTSSSLSVGSRSCDVCFRAKQTREVFPVSTNKSIECFSLIHCDVWGPYRVPSSCGAVYFLTIVDDFSRAVWTYLLLAKSEVRTVLTNFLVYTEKQFGKSVKVLRSDNGTEFMCLASYFREHGIVHQTSCVGTPQQNGRVERKHRHILNVARAILFQASLPIQFWGEAVLTAAYLINRTPTSLHNGLSPYEILHNSKPNYEHLRVFGSACYVHRASRDKDKFGERSRLCVFIGYPFAQKGWKVFDMEKKEFLVSRDVVFREDVFPYAATNTDHVSASPAPLLVDEDWMVSTTTLDRGSSAVLSANKNTDPKPNSVTKPDDFAEPESVTKPDDFAEPESVTKPDDFAEPVSVTKPDDFAEPDSVIKPVVVTESNSALQTDSVFEPDSDSDVAPASIASDLQNSRVDSSDSSTPDKNLASGDTLAQIDDSPDIVSTPNRNNQPLFVVDSPFVEATSPRQRKRQIRQSVRLQDYVLYNATVSPINPHALPDSSSQSSSMVQGTSSLYPLSDYVSDDCFSAGHKAFLAAITANDEPKHFKEAVRIKVWNDAMFKEVDALEINKTWDIVDLPPGKVAIGSQWVYKTKYNADGSIERYKARLVVQGNKQVEGEDYNETFAPVVKMTTVRTLLRLVAANQWEVYQMDVNNAFLHGDLDEEVYMKLPPGFRHSHPDKVCRLRKSLYGLKQAPRCWFKKLSDALLRFGFVQGHEDYSFFSYTRNGIELRVLVYVDDLLICGNDGYMLQKFKEYLGRCFSMKDLGKLKYFLGIEVSRGSEGIFLSQRKYALDIITDSGNLGCRPALTPLEQNHHLATDDGPLLADAKPYRRLVGRLLYLLHTRPELSYSVHVLSQFMQTPREAHLAAAMRIVRFLKGSPGQGILLNADTELQLDVYCDSDFQTCPKTRRSLSAYVVLLGGSPISWKTKKQDTVSHSSAEAEYRAMSVALREIKWLRKLLKELANPVFHERTKHIESDCHSVRDAVRDGIITTHHVRTNEQLADIFTKALGRSQFLYLMSKLGIQDLHTPTNGRHICCQEMELLLWEMVGKAFMIPEDFFSEYIEGRSVAELKLDFSDKSWEVKLSDRRITDGWEEFVVANDFRIGDVVAFRYVGNLVFHVSNLGPNYYEIEHNDGESLLRKRLHQVDFSSNNGDVCDSEELPKEKKAKTNSEEADAVSSSSSADKSCFMAIITALDLTTDTLYLPLHFTSANGLTRKNREIILTDGGERSRVLDLRFDESSGTFYISRGWRNFCDENGQKAGGFFLFKLVGKGETLVLSFCPTESINGEENITREDSKDECSSLDSLMNIVEKKKYIPKPRGSPYSSYSPSHKQFVTFTLPPDYARIGKLSLSAPFVRENGINKPGEICLLDKHGRKWLTSLLLDSKGTMSLGKGWKEFVKANSLETGFTLKLIWEETTPVLSLCSPESNSDREQEEISKAIEKHSLFIDPSNRDKISNNDKEENMSWERKKDHLKSRDSTLSSQKQFVTITITPSSDRLRLPKVFTRENGINKPGRITLLGKDGIKQQTNLLFDKANGAMSLGHGWKDFVKDNGLKTGDSFTLKLIWEDQTPVLSLCPADCSIDREAGGGRSETNQKKSLPIEPSTCKKIRKDVNIKDDNSKEKNDKEESKSVDGERKYLRGTYLTPSSQKHFVTLTITPSSIKKDRLILSPQFARKNNIDKPGMIYLLDTDGTKWLISLQRDKKGTMSLGKGWKEFAEANDFKLGESFTMELVWEDTTPMLSLLRTEFRSSKANEKESISSEHKTRESSPTIKNRIVTPALTPEDVKACKLVTSSNYSCFSEILPSQFMKKIRTVDKERNHLKGRDLNPSCQKQFVTFTITPTCVGKNRLILSAQFARENNINQPGTIYLLDTDGRKWLTTVKRDKKGTMSLGKGWKEFADTKDLKSGDSFTMELIWEDTNPVLSLLRTKFSSSKSNKEESIFLEPKSRDSSSPTIVNRFVTLALTPEDVTACKLILPSQFMKANGINNKLGKITLLGENGVEWPGYMLSLDGTLALGNGWEGFCEANGVKLGQTFTLEFVNEQDTTTTPRIPVAFFLKNIEGRYEQKTAELRSDASKITWEVKIDGQRLTDGWKEFALSHDLRIGDIVVFRQERDMSFHVTMLGPSCCEIQYGSCSDEERNLEKKKNPNGEAKSSSLDPSCFSANVAPSSLRYDLMLFPMGFVRENGVVGSGKIVLMNEKGRSWNFNLRQKPSCGTVYVRGGWVSFCDANGLQAGDIYTFKLIKRGGTLVLRLLPKGAESCSLDPSCFVANVAPSTLRYDTLYLPKRFMRENGVDKRRGEMILMNEKGKSWTLDLKLKKSCGTSLIRRGWRSFCSANGLRAGSIITFKLIKKSGTLVLCLLSNEPEEEVCSEANEVESLSTDQESHEESSHNEKISRRKEKKGRMIWKASSSPSENRFVTLNLTPYNILRSALRLPIPFTRMNGINEETKMTLLDKHGMKWLTTLRLVDYKRKRLGMVGGWKGFIQANGVKANESIMLELIWEEETSCVLKFCSKVKLAIK

SEQ ID NO: 1172 - protein, 272 aa, Ipomoea purpurea
MVNSSARWSPRVRKGAWSEEEDDLLRKCIQKFGEGKWHLVPFRAGLNRCRKSCRLRWLNYLHPDIKRGHFSLEEADLILRLHKLLGNRWSLIAGRIPGRTANDVKNYWHSHLKKKVVSMHMASSNSSRQDNNWDDEKGKAPQIKENILFRPRPRRFFRTSLSSPALSTLTGKAKAVVYDAPPPPPPPPHQLQPQPEATSPAADLLMVFNVQQNSNSIETNLPAQTTAPSSHDGVKWWEDLLYDDSHQGLIDWTTDDDFPIDVTLLKLLDTTI

SEQ ID NO: 1173 - protein, 264 aa, Poa pratensis
MSRKKKVRRRSTGPDSVAEIIKKWKEQNQKLQEENGSRKAPAKGSKKGCMAGKGGPENSNCKYRGVRQRTWGKWVAEIREPNRGNRLWLGSFPTAVEAAHAYDEAARAMYGATARVNFSERSPDANSGCTSAPPVLMSNGPTAVSYPSDEKDESESPPSLMSDAPTATLHRSDAKGEPESAGTLVHEVKTEVSNDSRSIREERKTVEVFQPEGKALHKEEKVSYDYFNVEEVLDMIIVELSADRKMEVHEEYQDGDDGFSLFSY

SEQ ID NO: 1174 - protein, 524 aa, Oryza sativa (japonica cultivar-group)
MPYYNNSVPSGGNGRFYITQNHQDAHYASSDDGSQKIGSSPQAFEAPYCTLESSSANGAHPAHSSASSHSISPISGSPLSHHDSHSDHTYNSPPSASCVTEITDLQIKLRELENAILGPELDIAYDSPESALQPNIMATPENWRQLLGINTGDLKQVIIACGKAVAENDVRLTELLISELGQMVSVSGDPLQRLGAYMLEGLVARLSSSGSKIYKSLKCKEPTSSELMSYMHLLYEICPFFKFGYMSANGAIAEAIKGENFVHIIDFQIAQGSQWMTLIQALAARPGGPPFLRITGIDDSNSAYARGGGLDIVGMRLYKVAQSFGLPFEFNAVPAASHEVYLEHLDIRVGEVIVVNFAYQLHHTPDESVSTENHRDRILRMVKSLSPRLVTLVEQESNTNTRPFFPRYLETLDYYTAMFESIDVALPRDDKRRMSAEQHCVARDIVNLIACEGAERVERHEVFGKWKARLTMAGFRPYPLSSVVNSTIKTLLHTYNSFYRLEERDGVLYLGWKNRVLVVSSAWC

SEQ ID NO: 1175 - protein, 174 aa, Arabidopsis thaliana
MANESNNLGLEITELRLGLPGDIVVSGESISGKKRASPEVEIDLKCEPAKKSQVVGWPPVCSYRRKNSLERTKSSYVKVSVDGAAFLRKIDLEMYKCYQDLASALQILFGCYINFDDTLKESECVPIYEDKDGDWMLAGDVPWEMFLGSCKRLRIMKRSYVPGFGRTKPRIKLG

SEQ ID NO: 1176 - protein, 608 aa, Arabidopsis thaliana
METNSSGEDLVIKTRKPYTITKQRERWTEEEHNRFIEALRLYGRAWQKIEEHVATKTAVQIRSHAQKFFSKVEKEAEAKGVAMGQALDIAIPPPRPKRKPNNPYPRKTGSGTILMSKTGVNDGKESLGSEKVSHPEMANEDRQQSKPEEKTLQEDNCSDCFTHQYLSAASSMNKSCIETSNASTFREFLPSREEGSQNNRVRKESNSDLNAKSLENGNEQGPQTYPMHIPVLVPLGSSITSSLSHPPSEPDSHPHTVAGDYQSFPNHIMSTLLQTPALYTAATFASSFWPPDSSGGSPVPGNSPPNLAAMAAATVAAASAWWAANGLLPLCAPLSSGGFTSHPPSTFGPSCDVEYTKASTLQHGSVQSREQEHSEASKARSSLDSEDVENKSKPVCHEQPSATPESDAKGSDGAGDRKQVDRSSCGSNTPSSSDDVEADASERQEDGTNGEVKETNEDTNKPQTSESNARRSRISSNITDPWKSVSDEGRIAFQALFSREVLPQSFTYREEHREEEQQQQEQRYPMALDLNFTAQLTPVDDQEEKRNTGFLGIGLDASKLMSRGRTGFKPYKRCSMEAKESRILNNNPIIHVEQKDPKRMRLETQAST

SEQ ID NO: 1177 - protein, 295 aa, Prunus mume
MSSSDLQLPPGFRFHPTDEELVKHYLCRKCQSQPISVPIIAEIDLYKYNPWDLPGLALYGEKEWYFFSPRDRKYPNGSRPNRAAGSGYWKATGADKPIGSPKPVGIKKALVFYAGKAPRGEKTNWIMHEYRLADVDRSPRKKSSSLRLDDWVLCRIYNKKGTVEKQQQQQQQQQQQTTSRMSSGSEFEDRKPENLACPPPPAAVAPTRPNDYVYFDTSDSVPRLHTDSSCSEHVVSPEFTCEVQSEPKWKEWEKALDFNYNYMDTSVENGFGPQFQSANQMSPLQDIFMYLQKPY

SEQ ID NO: 1178 - protein, 271 aa, Linaria triornithophora
HLPQVSSSLHSRAATSVVDLNGNEIQLHDMLSGHYLTTANAPVLESTALFNNNNNFNHDVVNGLNRDPSPTFPTKQAVKKDRHSGIYTSQGPRDRRVRLSIGIARKFFDLQEMLGFDKPSKTLDWLLTKSKTAIKELVQSKSTKSNSSSPCDDCEEVVSVESENVTDHSKGKSLKANNKSKEAMDSHQAAAKESRAKARARARERTKEKMCIKQLNEAIVLRNHQFEVSGTREAFVHPVFGFHQQNYGNTSHENWDQSNFASQSNQLCAIL

SEQ ID NO: 1179 - protein, 174 aa, Oryza sativa (japonica cultivar-group)
MAKRAGGARKKLRRGLWSPEEDEKLMNHIAKYGHGCWSSVPKLAGLERCGKSCRLRWINYLRPDLKRGAFSQEEEDLIIHLHSMLGNKWSQIAAQLPGRTDNEVKNFWNSYIKKKLRQRGIDPATHKPLAEWSDYVFDGYNHQLPPYNHGGIYGGGDSKDTAVHFDAHALGNWC

SEQ ID NO: 1180 - protein, 635 aa, Arabidopsis thaliana
MEHKANMAMVFVQIVYAGMPLLSKVAISQGTNPFVFVFYRQAFAALALSPFAFFLESSKSSPLSFILLLKIFFISLCGLTLSLNLYYVAIENTTATFAAATTNAIPSITFVLALLFRLETVTLKKSHGVAKVTGSMVGMLGALVFAFVKGPSLINHYNSSTIPNGTVPSTKNSVKGSITMLAANTCWCLWIIMQRFSKVESLVFGKMSFLSIVRDVRDTVGSFSRRSFDVRVSNGTTHQRSKSHGVEAHIEDLIVIKNTRWANLPAALLRDVMKKLDESESTWPARKQVVACAGVCKTWRLMCKDIVKSPEFSGKLTFPVSLKQPGPRDGIIQCYIKRDKSNMTYHLYLSLSPAILVESGKFLLSAKRSRRATYTEYVISMDADNISRSSSTYIGKLKSNFLGTKFIVYDTAPAYNSSQILSPPNRSRSFNSKKVSPKVPSGSYNIAQVTYELNLLGTRGPRRMNCIMHSIPSLALEPGGTVPSQPEFLQRSLDESFRSIGSSKIVNHSGDFTRPKEEEGKVRPLVLKTKPPRWLQPLRCWCLNFKGRVTVASVKNFQLMSAATVQPGSGSDGGALATRPSLSPQQPEQSNHDKIILHFGKVGKDMFTMDYRYPLSAFQAFAISLSTFDTKLACE

SEQ ID NO: 1181 - protein, 959 aa, Arabidopsis thaliana
MCEPDDNSARNGVTTQPSRSRELLMDVDDLDLDGSWPLDQIPYLSSSNRMISPIFVSSSSEQPCSPLWAFSDGGGNGFHHATSGGDDEKISSVSGVPSFRLAEYPLFLPYSSPSAAENTTEKHNSFQFPSPLMSLVPPENTDNYCVIKERMTQALRYFKESTEQHVLAQVWAPVRKNGRDLLTTLGQPFVLNPNGNGLNQYRMISLTYMFSVDSESDVELGLPGRVFRQKLPEWTPNVQYYSSKEFSRLDHALHYNVRGTLALPVFNPSGQSCIGVVELIMTSEKIHYAPEVDKVCKALEAVNLKSSEILDHQTTQICNESRQNALAEILEVLTVVCETHNLPLAQTWVPCQHGSVLANGGGLKKNCTSFDGSCMGQICMSTTDMACYVVDAHVWGFRDACLEHHLQKGQGVAGRAFLNGGSCFCRDITKFCKTQYPLVHYALMFKLTTCFAISLQSSYTGDDSYILEFFLPSSITDDQEQDLLLGSILVTMKEHFQSLRVASGVDFGEDDDKLSFEIIQALPDEKVHSKIESIRVPFSGFKSNATETMLIPQPVVQSSDPVNEKINVATVNGVVKEKKKTEKKRGKTEKTISLDVLQQYFTGSLKDAAKSLGVCPTTMKRICRQHGISRWPSRKIKKVNRSITKLKRVIESVQGTDGGLDLTSMAVSSIPWTHGQTSAQPLNSPNGSKPPELPNTNNSPNHWSSDHSPNEPNGSPELPPSNGHKRSRTVDESAGTPTSHGSCDGNQLDEPKVPNQDPLFTVGGSPGLLFPPYSRDHDVSAASFAMPNRLLGSIDHFRGMLIEDAGSSKDLRNLCPTAAFDDKFQDTNWMNNDNNSNNNLYAPPKEEAIANVACEPSGSEMRTVTIKASYKDDIIRFRISSGSGIMELKDEVAKRLKVDAGTFDIKYLDDDNEWVLIACDADLQECLEIPRSSRTKIVRLLVHDVTTNLGSSCESTGEL

SEQ ID NO: 1182 - protein, 828 aa, Arabidopsis thaliana
MESREDSFISKEKKSTMKKEKQAIASQRNRRRVIKNRGNGKRLIASLSQRKRRRIPRGRGNEKAVFAPSSLPNDVVEEIFLRLPVKAIIQLKSLSKQWRSTIESRSFEERHLKIVERSRVDFPQVMVMSEEYSLKGSKGNQPRPDTDIGFSTICLESASILSSTLITFPQGFQHRIYASESCDGLFCIHSLKTQAIYVVNPATRWFRQLPPARFQILMQKLYPTQDTWIDIKPVVCYTAFVKANDYKLVWLYNSDASNPNLGVTKCEVFDFRANAWRYLTCTPSYRIFPDQVPAATNGSIYWFTEPYNGEIKVVALDIHTETFRVLPKINPAIASSDPDHIDMCTLDNGLCMSKRESDTLVQEIWRLKSSEDSWEKFDMNSDGVWLDGSGESPEVNNGEAASWVRNPDEDWFNNPPPPQHTNQNDFRFNGGFPLNPSENLLLLLQQSIDSSSSSSPLLHPFTLDAASQQQQQQQQQQEQSFLATKACIVSLLNVPTINNNTFDDFGFDSGFLGQQFHGNHQSPNSMNFTGLNHSVPDFLPAPENSSGSCGLSPLFSNRAKVLKPLQVMASSGSQPTLFQKRAAMRQSSSSKMCNSESSSEMRKSSYEREIDDTSTGIIDISGLNYESDDHNTNNNKGKKKGMPAKNLMAERRRRKKLNDRLYMLRSVVPKISKMDRASILGDAIDYLKELLQRINDLHTELESTPPSSSSLHPLTPTPQTLSYRVKEELCPSSSLPSPKGQQPRVEVRLREGKAVNIHMFCGRRPGLLLSTMRALDNLGLDVQQAVISCFNGFALDVFRAEQCQEDHDVLPEQIKAVLLDTAGYAGLV

SEQ ID NO: 1183 - protein, 142 aa, Brassica napus
VVLSITERLVQAVEHIRDYTTERGSLIQLWVPVNRGGKRVLTTREQPYSHDPTCQRLANYREVSVNYHFSAEKDDSKALAGLPGRVFLGRLPEWTPDVRFFRSEEYPRVHHAQDCDVRGTLAIPVFEQGSKVCLGVIEPTRP

SEQ ID NO: 1184 - protein, 689 aa, Medicago truncatula
MFVYNSTLLEKEALVKGAALGQALDIDIPPPRPKRKPSNPYPRKTNVGTPTLHSGAKYGKPLIAIASSHGKQAMDFEKESLLEEHKDEERPTTVKENNDENCLKVLTILKEAPCSSVSSAIKSSISMSVPQTNSCTIRGFTPSVKEVITRDETNESFPTTEIENQMLKIDDGKHTQKNDGICRTSKLENCSPKSVQSEKTDGLTSALTIDEMQSNQNYPRHITVHVVDGNFGTSTQSPSQNMLIQDSTFQPIGGINVQPNLFANPAASNTSENQNNMARSSSHQSFPPCPPFAHNHADYQSFLNMSSTFSSLIVSTLLQHPAAHAAASFAATFWPYANVESSADSPACSQGGFPSRQIGSPPSVTAIAAATVAAATAWWAAHGLLPVCAPLQTAFACPPASTTVAPSTNISKEPPKTDQGDITLHNPPLQDQLLDPENSEALQAQHSGSKSPAVSSSESEESGDAKLNTSSKATINLDINQPISENPDSNKMEGRKLIDRSSCGSNTTSSCEETDALEKDEKEKEECKIPDADHLATDPSSRRYRSISNLLDSWKEVSEEGRLAFRALFSREVLPQSFSPPHDLINKDNQMDNMKDNEQKTDHKDHLESKKCICNCDQAQQNLPFVQNNNEEGFLTMGLGQGKLKTRRTGFKPYKRCLVEAKENRGGTACNQVEETGPKRIRLEGGTSI

SEQ ID NO: 1185 - protein, 127 aa, Brassica napus
  misc_feature (118)..(118): Xaa can be any naturally occurring amino acid
MGRPPCCGKMEVKKGPWTPEEDIILVSYIQQHGPGNWRSVPLNTGLLRCSKSCRLRWTNYLRPGIKRGNFTQPEEKTIIRLQALLGNRWAAIASYLPQRTDNDIKNYWNIHLKKKLEXKVQNGITNE

SEQ ID NO: 1186 - protein, 340 aa, Capsicum annuum
MGHHCCSKQKVKRGLWSPEEDEKLIKHITTHGHSCWSSVPKLAGLQRCGKSCRLRWINYLRPDLKRGCFSEQEERIIIDVHRILGNKWAQIAKHLPGRTDNEVKNFWNSCIKKKLISQGFDPNTHNLLSRAAAAATPPHRNNKKKTNNNHTTSSVFTIETSLSPSSTKELVSMDMIKASLAALSPFPHTNSSTTVLTMPQFQTSWSHLYESACNYYNHVPIKTNIVYQNHSTSTGTFGIINENCMWGVTGFEPHHEFGPSNNIGHEEMQQGAQVQLQEENCLEEVYKVNDLHEFNKHGRIAENVTFDDSSDFDFEFVDSELIPCGIYTNVNSIDQLAWDC

SEQ ID NO: 1187 - protein, 526 aa, Arabidopsis thaliana
MGQALDIAIPPPRPKRKPNNPYPRKTGSGTILMSKTGVNDGKESLGSEKVSHPEMANEDRQQSKPEEKTLQEDNCSDCFTHQYLSAASSMNKSCIETSNASTFREFLPSREEGSQNNRVRKESNSDLNAKSLENGNEQGPQTYPMHIPVLVPLGSSITSSLSHPPSEPDSHPHTVAGDYQSFPNHIMSTLLQTPALYTAATFASSFWPPDSSGGSPVPGNSPPNLAAMAAATVAAASAWWAANGLLPLCAPLSSGGFTSHPPSTFGPSCDVEYTKASTLQHGSVQSREQEHSEASKARSSLDSEDVENKSKPVCHEQPSATPESDAKGSDGAGDRKQVDRSSCGSNTPSSSDDVEADASERQEDGTNGEVKETNEDTNKPQTSESNARRSRISSNITDPWKSVSDEGRIAFQALFSREVLPQSFTYREEHREEEQQQQEQRYPMALDLNFTAQLTPVDDQEEKRNTGFLGIGLDASKLMSRGRTGFKPYKRCSMEAKESRILNNNPIIHVEQKDPKRMRLETQAST

SEQ ID NO: 1188 - protein, 231 aa, Pinus taeda
MSCSVGGMEKSSTGAQQENKCSLDIFAETELRLGLPGVAAGERQRICGKRSFSEAMESRNFSIPQEEAHKFHEPNLGTEKQMVRPANDPPKMGPTPPKAQIVGWPPVKDFRKVRTIAASSSLYVKVSMDGAPYLRKVDLKMYSTYHDLSSALENMFGCLITMGKCGSSGIKESNLMDVVNGSEYVATYEDKDGDWMLVGDVPWQMFVDSCQRVRIMKASEAIGLAPRAMEK

SEQ ID NO: 1189 - protein, 696 aa, Glycine max
MTVEKKMNDSGDEFPVGMRVLAVDDDPTCLLVLETLLRRCQYHATTTNQAIKALALLREHKDKFDLVISDVHMPDMDGFKLLELVGLEMDLPVIMLSANGDTKLVMKGISHGACDYLLKPVRMEELKNIWQHVIRRKKFDSKEKNKTRNIDKPTSNSSNGLGSSGTGNSDHNEKLTKKRKDQDEDEDEEQENDHDNDDPSAQKKPRVVWSVELHRKFVAAVNQLGIDKAVPKKILDLMNVEKLTRENVASHLQKYRLYLKRISCVANQQTNMVVALGGADPSYLRMNSVSGVGHIQSISGSGQLHNNAFRSFPPSGIINRLNTPAGLNVHGFPSGVLQLSQSQNLKNTNDNLKFQSAIVPANQNGVHGMTVSVGLDQLQNNKGVMSVQNLTTVFDAKTTFPISNKLPDPRPKITNSGSHTPDVSFSNNALMLEPRPQGTQGSVRIETLSSSVASQHSEFSLSLLDQGRYSDNWASTVQPSVIQTNSYPPSECFGQTNIPPTDNMASVPLQGGNLSGASITSLSRQSYDSMTDMHSEGVTFTNRPGHISSNVPYQGWHDNNQDATHHSNILSINSLTPVNGAAVPAGHAAMNSALHRNLDFNYCDPLQMKHEGFVELTDEALSKQHQGNIMNLPKSQQSHFSNNLGSLEDLVSSMMKQENDKMKLLDGNLICNNYSGGLSRCDSRFSSTFQNIMHPR

SEQ ID NO: 1190 - protein, 200 aa, Glycine max
MVQSRKFRGVRQRHWGSWVSEIRHPLLKRRVWLGTFETAEEAARAYDEAAILMSGRNAKTNFPVGENQIVGNHSSNTSSSSTTTLSAVLSAKLRKCCKSPSPSLTCLRLDTENSHIGVWQKRAGPRSDSNWIMMVELENKNNDNEGDHHQGPSSSDDSEFPVVVVDVDAQEKVKPEEESTGLDEEQKMALQMIEELLNRN

SEQ ID NO: 1191 - protein, 253 aa, Vitis labrusca x Vitis vinifera
MVRAPCCDKVGLKKGPWTTQEDQNLTAYVLQHGHGNWRALPKQAGLLRCGKSCRLRWINYLRPDIKRGNFSREEEDTIIELHEKLGNKWSAIAASLPGRTDNEIKNVWHTHLKKRLKKKLATPDSKGHFTPAASACDSDSFNSSGKMSPQPSSSEFSSFTDSSTRTMETHSTGVKNEQMEEYSPESFPEIDESFWSDALSSDNSSMASDFPAVADELQLQTPELACGQISNMMDDGMEFWYDVFIRAGGLQEL

SEQ ID NO: 1192 - protein, 256 aa, Zea mays
MGRGRVELKRIENKINRQVTFSKRRNGLLKKAYELSVLCDAEVALIIFSGRGKLYEFGSAGVTKTLERYQHFCYNAQDSNNGALSESQSWYQEISKLRAKFEALQRTQRHLLGEDLGPLSTVKELQQLEKQLECALSQARQRKTQLMMEQVEELRRTERHLGEMNRQLKHKLEAEGCSNYTTLQHAACWPAPGGTIVEHDGATYQVHPPAHSVAMDCEPTLQIGYPHHQFPPPEAANNIPRSAATGENNFMLGWVL

SEQ ID NO: 1193 - protein, 517 aa, Medicago truncatula
MVKGLMMFQQQQVVEENMSNLTSASGEASVSSGNRTEIGTSSSYPQVQQQYLVPPTQSQPMKKKRNLPGNPDPDAEVIAMSPKSLLAKNRFICEICNKGFQRDQNLQLHRRGHNLPWKLKQRTSKEIRKKVYVCPEPTCVHHDPSRALGDLTGIKKHFSRKHGEKKWKCEKCSKKYAVQSDWKAHSKTCGTREYRCDCGTLFSRRDSFITHRAFCDALAEESARAMTNNAMPILPSQQQLSSSSSHHHHMINLQNQFNNPQQDLHNFPLLKKEQHNQSFNLSEIPPWLGPHNVDNLSSSSSIFSQHHHHQENPNPSLVHVSGPTLPSYQTVPSAHMSATALLQKAAQMGATMNRSGSASSPAMNIKTHQVDSLNNVSGNFGLNLLSSSQEQQQHQQNTQETNTTSTYLNNIHDVMFSSSSSPSGFEATHFDEMFGGIMNSKKDQNLHHETSLSKKPTSTAEDGGGGGGGGGGNEGLTRDFLGLRPLSHSDILSIAGIGNCMNDQQQQNQSQKPSWQG

SEQ ID NO: 1194 - protein, 253 aa, Vitis labrusca x Vitis vinifera
MVRAPCCDKVGLKKGPWTTQEDQILTAYVLQHGHGNWRALPKQAGLLRCGKSCRLRWINYLRPDIKRGNFSREEEDTIIELHEKLGNKWSAIAASLPGRTDNEIKNVWHTHLKKRLTKKLATPDSKGHFTAAASTCDSDSFNSSGKMSPQPSSSEFSSFTDSSTRTMETHSTGVKNEQMEEYSPESFPEIDESFWSDALSSDNSSMASDFPAVADELQLQTPELAYGQISNMMDDGMEFWYDVFIRAGGLQEL

SEQ ID NO: 1195 - protein, 211 aa, Arabidopsis thaliana
MARGKIQLKRIENPVHRQVTFCKRRTGLLKKAKELSVLCDAEIGVVIFSPQGKLFELATKGTMEGMIDKYMKCTGGGRGSSSATFTAQEQLQPPNLDPKDEINVLKQEIEMLQKGISYMFGGGDGAMNLEELLLLEKHLEYWISQIRSAKMDVMLQEIQSLRNKEGVLKNTNKYLLDKIEENNNSILDANFAVMETNYSYPLTMPSEIFQF

SEQ ID NO: 1196 - protein, 434 aa, Picea abies
MEHLNAAAAQASSSLYGVSMAEYGDVGVSSMMALMTQHEPHERDSILTTSMPSSFSSFHGHAECLLSAAMFQASQGDHKLKRQPEMDQLVSEQAVMSDSSMPSVKTEGCSSLRNQFEIRREQTGNCYTDQSSNAPVSPLVTSLVPQAGGEARMITSLEADSSHFSGGKEAEAIKAKILAHPQYPSLLGAYIDCQKIGAPPEVVARLDALTHEYENQQHRTTVSIGMDPELDQFMEAYCEMLTKYHEELTKPFKEAMSFLKKIEAQLNSLSKGTIRISPSAENDEKTEGGASSEEVEDGSGGETDFQEVDHHAVEDRELKDHLLRKYSGYLSSLKQEFMKKKKKGKLPKDARQKLLDWWTVHYKWPYPSETEKIALAECTGLDQKQINNWFINQRKRHWKPSEDMQLMAMDGQSPHGATLYVERHLMTEGYHLDC

SEQ ID NO: 1197 - protein, 159 aa, Brassica napus
MGRSPCCEKDHTNKGAWTKEEDQKLISYIKSHGEGCWRSLPASAGLLRCGKSCRLRWINYLRPDLKRGNFTLEEDDLIIKLHSLLGNKWSLIATRLPGRTDNEIKNYWNTHMKRKLWSGGMAPATHRPTKAPRDASEARETEDSLVKLLSFGPPPSPPS

SEQ ID NO: 1198 - protein, 959 aa, Arabidopsis thaliana
MCEPDDNSARNGVTTQPSRSRELLMDVDDLDLDGSWPLDQIPYLSSSNRMISPIFVSSSSEQPCSPLWAFSDGGGNGFHHATSGGDDEKISSVSGVPSFRLAEYPLFLPYSSPSAAENTTEKHNSFQFPSPLMSLVPPENTDNYCVIKERMTQALRYFKESTEQHVLAQVWAPVRKNGRDLLTTLGQPFVLNPNGNGLNQYRMISLTYMFSVDSESDVELGLPGRVFRQKLPEWTPNVQYYSSKEFSRLDHALHYNVRGTLALPVFNPSGQSCIGVVELIMTSEKIHYAPEVDKVCKALEAVNLKSSEILDHQTTQICNESRQNALAEILEVLTVVCETHNLPLAQTWVPCQHGSVLANGGGLKKNCTSFDGSCMGQICMSTTDMACYVVDAHVWGFRDACLEHHLQKGQGVAGRAFLNGGSCFCRDITKFCKTQYPLVHYALMFKLTTCFAISLQSSYTGDDSYILEFFLPSSITDDQEQDLLLGSILVTMKEHFQSLRVASGVDFGEDDDKLSFEIIQALPDKKVHSKIESIRVPFSGFKSNATETMLIPQPVVQSSDPVNEKINVATVNGVVKEKKKTEKKRGKTEKTISLDVLQQYFTGSLKDAAKSLGVCPTTMKRICRQHGISRWPSRKIKKVNRSITKLKRVIESVQGTDGGLDLTSMAVSSIPWTHGQTSAQPLNSPNGSKPPELPNTNNSPNHWSSDHSPNEPNGSPELPPSNGHKRSRTVDESAGTPTSHGSCDGNQLDEPKVPNQDPLFTVGGSPGLLFPPYSRDHDVSAASFAMPNRLLGSIDHFRGMLIEDAGSSKDLRNLCPTAAFDDKFQDTNWMNNDNNSNNNLYAPPKEEAIANVACEPSGSEMRTVTIKASYKDDIIRFRISSGSGIMELKDEVAKRLKVDAGTFDIKYLDDDNEWVLIACDADLQECLEIPRSSRTKIVRLLVHDVTTNLGSSCESTGEL

SEQ ID NO: 1199 - protein, 281 aa, Glycine max
MQEPSLGLMGEVSGDHHRQLKAEITTHPLYEQLLAAHVACLRVATPIDQLPLIDAQLSQSHHLLRSYVSHNTHSLSPHHRQELDNFLAQYLIVLCTFKEQLQQHVRVHAVEAVMACRDIENALQALTGVSLGEGTGATMSDDEDDLQMDISLDQSSAEGHDMMGFGPLLPTESERSLMERVRQELKIELRQGFKSRIEDVREEILRKRRAGKLPGDTTSVLKNWWQQHAKWPYPTEDDKAKLVEETGLQLKQINNWFINQRKRNWHSNSQSVTSLKSKRKR

SEQ ID NO: 1200 - protein, 428 aa, Sorghum bicolor
MSISVNGQSVVPPGFRFHPTEEELLTYYLKKKVASERIDLDVIRDVDLNKLEPWDIQEKCRIGSGPQNDWYFFSHKDKKYPTGTRTNRATAAGFWKATGRDKAIYASGARRIGMRKTLVFYKGRAPHGQKSDWIMHEYRLEPALDVDAAAGSASAHHAAAGAAADHHPYYTSSSPPALPTAIRGAAGDQQAAQEQEGWVICRVFKKKNLVHHGQSSGGGVTAAGSKMASAAAPMEGSPSHCSSVTVISDHTMNKHQAQAMLQHSASDDDALDHILQYMGGGGGKQPDTKPVLLDHHHHHHLAAAATTTTTACSAGGAGLYGKFMKLPPLEHAGGGGGLLPSPAGACDYGAADASGIADWDALDRLAAYELNGLSDASKNMSAFFDEPSATAAFSSSSSSVHAAAVDGDLWSLARSVSALHADLTMNNV

SEQ ID NO: 1201 - protein, 165 aa, Magnaporthe grisea 70-15
MSDSPQSNPKEIEGAHTPDEEAQMNDPQDPQSAGLGYEFEVKEQDRWLPIANASEKCHQEKRKTVNGEDILFAMTSLGFENYSEALKIYLAKYREQNQSTRGEGQQNRPSSQGYGAPPGAAPGTNATAGFPGGELGQQGTEAPGDASGYLYSTQPGHNGATAGEY

SEQ ID NO: 1202 - protein, 205 aa, Glycine max
MATTISCDFSSMESIQHYLLEPEHDSNALMNISNHEVCYSATYNAFPSPTFSLEGVVHDANDSLACKREHPREEREVHAPPVWKHYRGVRRRTWGKFAAEIRDPKKNGARIWLGTYETEEAAGLAYDRAAFKMRGSKAKLNFPHLIGSHAPPQPVRVTKALKRNSPEKRKNLADLLNRLAKNRSQILIQVLEMGLHANYVNVEQW

SEQ ID NO: 1203 - protein, 123 aa, Brassica napus
FRGRPRRQRTRGVSAFQVFNGISPLVKFSHFTANQAIQEAFDKEDCVHIIDLDIMQGLQWPGLFHILASRPGGPPHVRLTGLGTSMEALQATGKRPSDFADKLGLPFEFCPLGDKVGNLDAER

SEQ ID NO: 1204 - protein, 554 aa, Arabidopsis thaliana
  misc_feature (359)..(359): Xaa can be any naturally occurring amino acid
  misc_feature (370)..(370): Xaa can be any naturally occurring amino acid
MTMEQEIEVLDQFPVGMRVLAVDDDQTCLRILQTLLQRCQYHVTTTNQAQTALELLRENKNKFDLVISDVDMPDMDGFKLLELVGLEMDLPVIMLSAHSDPKYVMKGVKHGACDYLLKPVRIEELKNIWQHVVRKSKLKKNKSNVSNGSGNCDKANRKRKEQYEEEEEEERGNDNDDPTAQKKPRVLWTHELHNKFLAAVDHLGVERAVPKKILDLMNVDKLTRENVASHLQKFRVALKKVSDDAIQQANRAAIDSHFMQMNSQKGLGGFYHHHRGIPVGSGQFHGGTTMMRHYSSNRNLGRLNSLGAGMFQPVSSSFPRNHNDGGNILQGLPLEELQINNNINRAFPSFTSQQNSPMXVAPSNLLLLEXGNPQSSSLPSNPGFSPHFEISKRLEHWSNAALSTNIPQSDVHSKPDTLEWNAFCDSASPLVNPNLDTNPASLCRNTGFGSTNAAQTDFFYPLQMNQQPANNSGPVTEAQLFRSSNPNEGLLMGQQKLQSGLMASDAGSLDDIVNSLMTQEQSQSDFSEGDWDLDGLAHSEHAYEKLHFPFSLSA

SEQ ID NO: 1205 - protein, 253 aa, Petunia x hybrida
MGRGRVELKRIENKINRQVTFSKRRNGLLKKAYELSVLCDAEVALIIFSSRGKLYEFGNAGITKTLERYQRCCLNPQDNCGERETQSWYQEVSKLKGKFEALQRTQRHLLGEDLGPLSVKELQNLEKQLEGALAQARQRKTQIMMEQMEELRRKERHLGDVNKQLKVKVSLELSSLEAEGQAGLNRALPFLWTSNALEAGNSNFPVHHSQSNPMDCGPDPVLQYRDHHYMAADGPSGSRSMAVETNIMQGWGL

SEQ ID NO: 1206 - protein, 243 aa, Citrus sinensis
MGRGRVQLKRIENKINRQVTFSKRRAGFLKKAHEISVLCDAEVAVIIFSHKGKLFEYSTGSCMEKILERYERYAYAERQLIAPDPESQRNWPLECNNLKAKIDLLQKDQRHYLGEDLESLSLKDIQQLEQQLDTALKHIRSRKNQLMQESISELQKKEKSIEEQNNLLVKQIKEREKAAAQQAQWGNQIQNQVPNTLSFLLPQPPPCLRLGGAYQEQASEMRRNELNLTLEPVCSCSLGCFAG

SEQ ID NO: 1207 - protein, 448 aa, Glycine max
MNKISNLSCVRSSDLIDAKLEEHQLCGSKQCPGCGHKFEVKPDWLGLPAGVKFDPTDQELIEHLEAKIEAKNMKSHPLIDEFIPTIEGEDGICYTHPEKLPGVTRDGLSRHFFHRPSKAYTTGTRKRRKIQNECDLQGGETRWHKTGKTRPVMVNGKQKGYKKILVLYTNFGKNRKPEKTNWVMHQYHMGQHEEEKEGELVVSKIFYQTQPRQCNWSDRSATTGEGSGEQQPNNNNGRRDSGSGSCSSSKEIVTHRDEMSAVVGVPPITTFNTSLDIQQLKSNHFGFIPFRKGFDEVGIGEASTAREVQASGSCNEVHERHVAHHHQQQQQNQHAHQQIATTAFHISSPSLPISTIISPPPFHHASIILDDNSYHVSRIMLQNENFQQQQQQHHKLGGRSASGLEELIMGCTSTDIKAESSITNPQEAEWLKYSSYWPDPGNMQDHRE

SEQ ID NO: 1208 - protein, 359 aa, Triticum aestivum
  misc_feature (28)..(28): Xaa can be any naturally occurring amino acid
  misc_feature (93)..(93): Xaa can be any naturally occurring amino acid
  misc_feature (103)..(103): Xaa can be any naturally occurring amino acid
  misc_feature (118)..(118): Xaa can be any naturally occurring amino acid
  misc_feature (133)..(133): Xaa can be any naturally occurring amino acid
CREIVTSPEFCGKLTFPVSLKQPGPRDXMIQCFIKRDKSKSTYHLYLCLTNAVLVENGKFLLSAKRIRRTTCTEYVISMDAATRPRSSSTYMXKLRSNFLGTXHFIVYDTQPPYNGAXVPPVGTGVARRFNSXKKGSPKVPSGSYNIAQVSYELNVLGTRGPRRRNCIMHSIPASSVEPGGIVPGQPDQIMPRALEDSFRSMSSFSKSSIMDRSTDFSSSRYFSSSRFLSDIAGGAAISRDEDGEKERPLVLRNKVPRWHEQLQCWCLNFRGRVTIASVKNFQLIAAPSQPPPPATGAGAPAPAPAPSQPAPAPEQDKIILQFGKVSKDMFTMDYRYPLSAFQAFAMCLSSFDTKLACE

SEQ ID NO: 1209 - protein, 336 aa, Arabidopsis thaliana
MELLMCSGQAESGGSSSTESSSLSGGLRFGQKIYFEDGSGSRSKNRVNTVRKSSTTARCQVEGCRMDLSNVKAYYSRHKVCCIHSKSSKVIVSGLHQRFCQQCSRFHQLSEFDLEKRSCRRRLACHNERRRKPQPTTALFTSHYSRIAPSLYGNPNAAMIKSVLGDPTAWSTARSVMQRPGPWQINPVRETHPHMNVLSHGSSSFTTCPEMINNNSTDSSCALSLLSNSYPIHQQQLQTPTNTWRPSSGFDSMISFSDKVTMAQPPPISTHQPPISTHQQYLSQTWEVIAGEKSNSHYMSPVSQISEPADFQISNGSVSPYSPPSLLSLVCYLRPL

SEQ ID NO: 1210 - protein, 302 aa, Hordeum vulgare subsp. vulgare
MGRPSSGAVGQPKVRKGLWSPEEDEKLYNHIIRHGVGCWSSVPRLAALNRCGKSCRLRWINYLRPDLKRGCFSQQEEDHIVALHQILGNRWSQIASHLPGRTDNEIKNFWNSCIKKKLRQQGIDPATHKPMASADTATAAAALPDAEEEDRKPLCPAVDGSLVPKQPAVFDPFPLCVDYGAGFAEELGAANAAALYGQLCGGKEVADDDAGFGAADYSCVLDVSENLGYGESSSNSSNWNYGGEVGSVLDGEVPHWAKAEPAFAEMERQQQHSPAEQKLSLPCQEQSLLASFDFNLELEPYF

SEQ ID NO: 1211 - protein, 398 aa, Glycine max
MAVENQREDGGCDRFPVGMRVLAVDDDPICLKVLENLLRKCQYHVTTTNQAVEALTMLRENRNKFDLVISDVNMPDIDGFKLLELVGLEMDLPVIMLSAHGDTKLVMKGVTHGACDYLLKPVRIEELKNIWQHVVRRKNFDSRDQNKASNEEKAPNFAGGGSQGLRSENSADQNKRLGKKRKDQSDEEEEGGEENEDDEDPSAQKKARVVWSVELHRKFVAAVNQLGLDKAVPKKILDLMNVEGLTRENVASHLQKYRLYLKKAAQQANMVAALGGSDSYLRMGSIDGYGDFCTSSGSGRITNTTLPSYASTGIFSRLNSPAALNMRAISSSALIRPVQSQNINCSLNTLGNIQPSIFPANHSSSLLQGIPTSIELNQSKQSNCTTGISQLNAWPRSV

SEQ ID NO: 1212 - protein, 269 aa, Ipomoea nil
MVNSSARWSPRVRKGAWSEEEDDLLRKCIQKFGEGKWHLVPFRAGLNRCRKSCRLRWLNYLHPDIKRGHFSLEEADLILRLHKLLGNRWSLIAGRIPGRTANDVKNYWHSHLKKKVVGMHMASSNSSRQDNNWDDEKGKAPQIKENILFRPRPRRFFRTSLSSPALSTLTGKAKAVAYDAPPPPHHHQLQAQPEATSPPADLLMVFNVQQNNNSMATNFPAQTTAPPSHDGVKWWDLLYDDDHQGLIDWTTDDDFPIDVDLLKLLDTTI

SEQ ID NO: 1213 - protein, 137 aa, Brassica napus
  misc_feature (101)..(101): Xaa can be any naturally occurring amino acid
  misc_feature (128)..(128): Xaa can be any naturally occurring amino acid
MVQTKKFRGVRQRHWGSWVAEIRHPLLKRRIWLGTFETAEEAARAYDEAAVLMSGRNAKTNFPLNNNNTGDTSEGKTDISASSSSSSLSSILSAKLRKCCXSPSPSLTCLRLDTASSHIGVWQKRAGXKSDSSWVMT

SEQ ID NO: 1214 - protein, 433 aa, Glycine max
MGRHSCCYKQKLRKGLWSPEEDEKLLNYITKHGHGCWSSVPKLAGLQRCGKSCRLRWINYLRPDLKRGAFSQQEENSIVELHAVLGNRWSQIAAQLPGRTDNEIKNLWNSCLKKKLRQRGIDPNTHQPLSEIENDKDKPLTADKSNQKASNEVMSLVEPPKPKPIATTATTSMPMDRHPLEVSSTSKISSGNNNSTLDRFDSSITSSDMMGMGYFPFQHLNYGPNMGLTTTPNNTPLCFIPSSTSSQMMSELNSTMFHSMFPTHVKPTVSLHSNNNNNPSSISSDGVQNWEAGTFSNNNNASKSNGSSSCSIQLQSGSTNFLDHSSTITWGLQAESATKADKDAHVVVPLQSSEQEDIKWSEYLNNTPFFLGTMSVQHQTTNSLYSSDEVKPETTGFIADESSTSWHHSQHFQPSEIYTKDLQRFSVAFGQTL

SEQ ID NO: 1215 - protein, 250 aa, x Aranda deborah
MGRGRVELKMIENKINRQVTFAKRRKRLLKKAYELSVLCDAEVALIIFSNRGKLYEFCSSTSMLKTLEKYQKCNFGSPESTIISRETQSSQQEYLKLKNRVEALQRSQRNLLGEDLGPLGSKELEQLERQLDSSLRQIRSTRTQFMLDQLADLQRREQMLCEANKTLKRRFEESSQANQQQVWDPSNTHAVGYGRQPAQHHGEAFYHPLECEPTLQIGYHSDITMATATASTVNNYMPPGWLGQISGSYE

SEQ ID NO: 1216 - protein, 562 aa, Triticum aestivum
  misc_feature (204)..(204): Xaa can be any naturally occurring amino acid
  misc_feature (208)..(208): Xaa can be any naturally occurring amino acid
  misc_feature (253)..(253): Xaa can be any naturally occurring amino acid
  misc_feature (312)..(312): Xaa can be any naturally occurring amino acid
MMGGGVAMMDRRMAFPADGDVEKGFGFFGAGCFVGAGDLADPAPEQRARDRFPDEEESEEEDDDDDVDGIEELERRMWRDRMRLKRLKELQQRQSQRPDGGAAASKGRPRRPPSQQDQQARRKKMSRAQDGILKYMLKMMEACSAQGFVYGIVPENGKPVGGASDNLRAWWKEKVRFDRNAPAAIAKHRSDNAAPLCGGEDGAXGGGXPRSLHELQDTTLGSLLSSLMQHCDPPQRRFPLEKGVPPPWWKQGXHEACWPELSPNWVPLLKGGEGVSHKLHPRAFLPPRAFGGGGSFEPSSGDKNSTSLRGGXANQMKARSEAAPFVDLTMDASSSNEFMVMPPALMKEETTNDVDFTHAQKRSAADAEPELMLNGSARVYTCENVQCPHAGHALGFLDRNARSAHQYTCRYNNPAVAAAQSKPPSSFFPGAPYSPQSQALGGFDFGLPVADQRCLSGLMSMYETGVAAHRGATNDADAPGMQLGGGNVLAPRSLAGANNVMQQQQQQQQQSAAFFMGDDAPFGMAAPELGRFGPGFDLSAADYAGAMQQPQPQKHVGPNWFY

SEQ ID NO: 1217 - protein, 859 aa, Arabidopsis thaliana
MASSEVSMKGNRGGDNFSSSGFSDPKETRNVSVAGEGQKSNSTRSAAAERALDPEAALYRELWHACAGPLVTVPRQDDRVFYFPQGHIEQVEASTNQAAEQQMPLYDLPSKLLCRVINVDLKAEADTDEVYAQITLLPEANQDENAIEKEAPLPPPPRFQVHSFCKTLTASDTSTHGGFSVLRRHADECLPPLDMSRQPPTQELVAKDLHANEWRFRHIFRGQPRRHLLQSGWSVFVSSKRLVAGDAFIFLRGENGELRVGVRRAMRQQGNVPSSVISSHSMHLGVLATAWHAISTGTMFTVYYKPRTSPSEFIVPFDQYMESVKNNYSIGMRFKMRFEGEEAPEQRFTGTIVGIEESDPTRWPKSKWRSLKVRWDETSSIPRPDRVSPWKVEPALAPPALSPVPMPRPKRPRSNIAPSSPDSSMLTREGTTKANMDPLPASGLSRVLQGQEYSTLRTKHTESVECDAPENSVVWQSSADDDKVDVVSGSRRYGSENWMSSARHEPTYTDLLSGFGTNIDPSHGQRIPFYDHSSSPSMPAKRILSDSEGKFDYLANQWQMIHSGLSLKLHESPKVPAATDASLQGRCNVKYSEYPALNGLSTENAGGNWPIRPRALNYYEEVVNAQAQAQAREQVTKQPFTIQEETAKSREGNCRLFGIPLTNNMNGTDSTMSQRNNLNDAAGLTQIASPKVQDLSDQSKGSKSTNDHREQGRPFQTNNPHPKDAQTKTNSSRSCTKVHKQGIALGRSVDLSKFQNYEELVAELDRLFEFNGELMAPKKDWLIVYTDEENDMMLVGDDPWQEFCCMVRKIFIYTKEEVRKMNPGTLSCRSEEEAVVGEGSDAKDAKSASNPSLSSAGNS

SEQ ID NO: 1218 - protein, 62 aa, Brassica napus
  misc_feature (37)..(37): Xaa can be any naturally occurring amino acid
MDDGEVEFPLSSSSMDSFFNELLRDSHACTHTHTCNXPPGPENTHTHTCLHVHTKILPAQAE

SEQ ID NO: 1219 - protein, 157 aa, Nicotiana benthamiana
VRAPCCEKMGLKKGPWTPEEDQILISFIQTNGHGNWRALPKQAGLLRCGKSCRLRWTNYLRPDIKRGNFTKEEEDTIIQLHEMLGNRWSAIAGKLPGRTDNEIKNVWHTHLKKKLKDYKPPQNSKRHSKNHDSKGPTTSRSSNNSDLTTQKHIDSPV

SEQ ID NO: 1220 - protein, 500 aa, Oryza sativa (japonica cultivar-group)
MAQFGGFGGWSAMDVAAAAAAALGNVSGAVYHADPAAAVYASLVPGMAVVPGRAPPSAVQIEAARRWKELEKMALRSVNLMVTCAGAIQAGDYAAAAGSLSDAREIFAKMPTTRTGIGRVLTHFADALAERLFPAFPQSAPPPPPPRGEQRELFRGFYEAGPYLKFAHLAANQAILEAFEGCNSVHVIDFALTDGIQWPSLIQALAVRPGGPPFLRITGIGPHAAGNRDELRDVGLRLAEFARSCSVPFAFRGIAADQLDGLRPWMFQVAPGEAVAINSVLQLHRLLVDQDAAAAASFPAPIDGVLDWVASMNPRVFTVVEQEADHNKSSLLERFTNSLFYYASMFDSLEAISRHGGGDGAGNPLAEAYLQGEIADIVSREGSSRVERHEQMPRWVERLRRGGMTQLPLGATGLWQAAMQLREFSGAGFGVQENGGFLTLTWHSQRLYSASAWRATAGKKMTMMASGAADAMEESQNSNTNGGGGGSSGGGHGALNQIMQ

SEQ ID NO: 1221 - protein, 287 aa, Brassica napus
MMESRDPAIKLFGMKIPFPAVFEPTTAVTLEEDYSGGDDKSPEKVTTEQATPEKKNNCNNKSLNNSNDSKPETGDKEEATSTDQIESDETNQQTTADGKTLKKPTKILPCPRCKSMDTKFCYYNNYNINQPRHFCKACQRYWTAGGTMRNVPVGAGRRKRKSSSSHYRHITISEALQAARLDPGLQSNTRVLSFGLQAPPHQQHVAPMTPVMKLQGDQKVSNGARNGLAARVENGDDWSSGSSGTTSGGETRAQTCRVGEPQGDNTLNGYACLPGVAWALPVGIQGS

SEQ ID NO: 1222 - protein, 255 aa, Populus deltoides
MGRGRVQLKRIENNISRQVTFSKRRTGLLKKAHEISVLCDADVAVIVFSTKGKLFEYSTDSSMESILERYERCSYAEQQFVPHGPEHQGSWFLEHPKLRARVELLQRNLRNYTGQDLDPLSYKELHHLEQKIDTALKSVRSRKNQLVHESLAEMQKKEKALQDQNNILVEQVKKKLKALTEQAQWEQQNLGQNSSSFMLPQAQPPLQPSMLSHPPPTLGGSFQIRGFLNGNKDVEVQTQPSTMPHWMLRHVNDRI

SEQ ID NO: 1223 - protein, 331 aa, Triticum aestivum
  misc_feature (267)..(267): Xaa can be any naturally occurring amino acid
  misc_feature (272)..(272): Xaa can be any naturally occurring amino acid
ARGQPGPRDGMIQCFIKRNKSKSTYQLYLCLTNVVTAETGKFLLSAKRNRKTSCTEYAISMDSANTSRSNRTYIGKLRSNFLGTKFLIYDTQPPYNGAVVPPVGRSSRRFNSTRVSPKVPAVSYNIAQVTYELNVLGTRGPRRMRCIMHSIPASSVEPGGVVPGQPEQIVPRALGDSFRSITSFSQSFRSSATFSRSIMDQSMDFNSARFSEISGGGVTDGDGKGEVKERPLVLRNKPPRWHEQLQCWCLNFRGRVTIASVKNFQLXPRRAXPPAGAPTPSQPGPVDPEKVILQFGKVARDMFTMDYRYPLSAFQAFAICLSSFDTKLACE

SEQ ID NO: 1224 - protein, 547 aa, Arabidopsis thaliana; identical to SEQ ID NO: 111

SEQ ID NO: 1225 - protein, 287 aa, Brassica napus
  misc_feature (92)..(92): Xaa can be any naturally occurring amino acid
  misc_feature (106)..(106): Xaa can be any naturally occurring amino acid
  misc_feature (170)..(170): Xaa can be any naturally occurring amino acid
  misc_feature (179)..(179): Xaa can be any naturally occurring amino acid
  misc_feature (211)..(211): Xaa can be any naturally occurring amino acid
MANPHEPHFFKPLLPGFHDGVTIPLSFFSHHIQGKTNGKKWKLRSDASDQTWEVIQEGRRLTGGWKDFTTAHDLQIGDVLVFKHEGDMVFHXTPFGPSCCEIQYTXPHSIKEEADVDDTHSFSFDYCFLAEVTASNINEDKLYLPVEATTCTALNKQCKEIIFVNKEGNXWTGSLRYSXADDMYYIRKGWRKFCEENRCTIGDLFVFNVVXDGNTTPLMCVCPERKECSELLIKHLSRNGDIATPHGPIECFLVSITCFLFPFGTTAYCKLEFGYVLSERLFHFASK

SEQ ID NO: 1226 - protein, 223 aa, Glycine max
MATTISCDFSSVESIQHYLLELEHDFNTLMNASNHEICYSPTYNSFPSSTTFRLEGVHDAEGSLACKREHPKVEREFHAPPAWKRYRGVRRRPWGKFAAEIRDPKKNGARIWLGTYETEEEAGLAYDRAAFKMRGSKAKLNFPHLIGSHAPLKPIRVLTKTLKQNLLESDLSYSSAPQTQESKKRKNLTDLLNRLAKNRKQVEVFEMSLHASNDVNVDQWWSN

SEQ ID NO: 1227 - protein, 365 aa, Oryza sativa (japonica cultivar-group)
MAKQSCCHKKKLRRGLWSPEEDEKLMNHIAKYGHGCWSSVPKLAGLERCGKSCRLRWINYLRPDLKRGTFSQEEEDLIIQLHSMLGNKWSQIAAQLPGRTDNEVKNFWNSYIKKKLRDRGIDPATHKPLAADSSATPTNTTAAAASRSTATCRAVFSDAELQIPTAAAVQQQQQAPLVGAMQLVDGIKMPLDDYWPAAAAAAAPSSSTTTFSAYHHALSMQQQAAAGCGAAAAFDMDALSHCGVVVAPSASSSSTLTSMAGLSPAAADAAEQSANVAAAAAATTTNLPWLDLGHANPIATMDHYAGVLDELRWSDYFDGAYQAATTATQGGALQGQCLYDGGGGGGKDVDDAVQFVDVHSLSNWC

SEQ ID NO: 1228 - protein, 283 aa, Arabidopsis thaliana
MGATVGGDGDTAVVAEQNRQLKGEIATHPMYEQLLAAHVACLRVATPIDQLPIIEAQLSQSHHLLRSYASTAVGYHHDRHELDNFLAQYVMVLCSFKEQLQQHVRVHAVEAVMACREIENNLHSLTGATLGEGSGATMSEDEDDLPMDFSSDNSGVDFSGGHDMTGFGPLLPTESERSLMERVRQELKLELKQGFKSRIEDVREEIMRKRRAGKLPGDTTTVLKNWWQQHCKWPYPTEDDKAKLVEETGLQLKQINNWFINQRKRNWHNNSHSLTSLKSKRKH

SEQ ID NO: 1229 - protein, 255 aa, Zea mays
MGRGRVELKRIENKINRQVTFSKRRNGLLKKAYELSVLCDAEVALIIFSGRGKLYEFGSAGVTKTLERYQHCCYNAQDSNNSALSESQSWYQEMSKLRAKFEALQRTQRHLLGEDLGPLSVKELQQLEKQLECALSQARQRKTQVMMEQVEELRRTERHLGEMNRQLKHKLEAEGCSNYTTLQHAACWPAPGGTIVEHDGATYQVHPPAHSVAMDCEPTLQIGYPHHQFPPPEAVNNIPRSAATGENNFMLGWVL

SEQ ID NO: 1230 - protein, 227 aa, Zea mays
MARGKVQLRRVENPVHRQVTFCKRRAGLLKKARELSVLCDASVGIIVFSAHGKLYDLATTGTMEELIERYKAASAGEATTDGCGRHNRMDPKHETTVLQQEINLLQKGLRYIYGNRANEHMNVDELNALERYLEIWMYNTRSAKMQIMAQEIQALKSKEGMLKAANEILQEKIVEQSSLLDVGMVVADQQNGRFSTVPLVEEVISSNPLTVLSGYSSCRGSEMGYSF

SEQ ID NO: 1231 - protein, 188 aa, Triticum aestivum
  misc_feature (159)..(159): Xaa can be any naturally occurring amino acid
  misc_feature (178)..(178): Xaa can be any naturally occurring amino acid
MEDGRALRRMSIPTRRSRSADFHNFSERRRRDKINEKLKALQELLPNCTKTDKVSMLDEAIDYLKSLQLQLQMLVMGKGMAPVVPPELQQYMHYITTDPAAQLMQMPPSEPPRPFQITHANPPQRESDFLSQMQNHLHPSDQPQINFLRPPKLQLYTPXEQKGNCRQQQLGTNGGWVXARDPSYNFME

SEQ ID NO: 1232 - protein, 227 aa, Zea mays
MARGKVQLRRVENPVHRQVTFCKRRAGLLKKARELSVLCDASVGIIVFSAHGKLYNLATTGTMEELIERYKAASAGEATTDGCGRHNRMDPKHETTVLQQEINLLQKGLRYIYGNRANEHMNVDELNALERYLEIWMYNTRSAKMQIMAQEIQTLKSKACMLKAANEILQEKIVEQSSLLDVGMVVADQQNGRFSTVPLVEEVISSNPLTILSGYSSCRGSEMGYSF

SEQ ID NO: 1233 - protein, 297 aa, Zea mays
MAVDEASSSGGGEEGCGSWTREQEKAFENAVATMGGEEDGDARWEKLAEAVEGKTPEEVRRHYELLVEDVDGIESGRVPLPAYAADGAAEEGGGGGKKGSGGGGTHGDKRSAKSAEQERRKGIAWTEDEHRLFLLGLEKYGKGDWRSISRNFVISRTPTQVASHAQKYFIRLNSMNRERRRSSIHDITSVNNGDPSTAQGPITGQTNGQAANPGKPSKQSPQPANTPPGVDAYGTTIGQPVGGPLVSAVGTPVTLPVSAPPHLAYGMRAPVPGAVVPGAPVNIAPMPYPMPPPPSHG

SEQ ID NO: 1234 - protein, 204 aa, Triticum aestivum
  misc_feature (127)..(127): Xaa can be any naturally occurring amino acid
MVQSKKKFRGVRQRHWGSWVSEIRHPLLKRRVWLGTFETAEEAARAYDEAAILMSGRNAKTNFPVPRSANGEIIVAPAVARDGRGGVGSSSSGAAGASSLSQILRAKLRKCCKTPSPYPSPASDLDXPKKSTLGVWQKARGAPAPNSKLGHEPSRLNKEAGRTAGGPPQRPNGQPRGPGNSFGPSHEHPPPTGLPRSVRPTGRD

SEQ ID NO: 1235 - protein, 337 aa, Triticum aestivum
RRKEEEEGFATWHGIHGIVGSFFFLFLPLPLALPSSQAPVSPPSQPAAAERGPGGRHRRLLSATPLRPETGEMEGFEFFQIILDNSSSRLRLPDKFTRVLLDGGKPQEVKLREAGHGRRFWDVKVVLDADGHMYLGRGWEQFARAHDLRLGYFLVFSFDGDAVLTVKVFDVSMCRRHYQHDGDTSSGSSSDGDSGSSNASDGGSGGNNWSLAEMDVEDGPTGQFSAMLRKCNLGMKQEQYLNVPVDFQLAHGYAERSKVELRMRGKSWLVHLKHNPKTGGRPRASFRYGWHQFCVDNALGEGDTCFFRALRQGSAGGGGEDHLLKVEVRRRDGSFLV

SEQ ID NO: 1236 - protein, 120 aa, Brassica napus
  misc_feature (11)..(11): Xaa can be any naturally occurring amino acid
  misc_feature (14)..(14): Xaa can be any naturally occurring amino acid
  misc_feature (22)..(22): Xaa can be any naturally occurring amino acid
  misc_feature (35)..(35): Xaa can be any naturally occurring amino acid
  misc_feature (44)..(44): Xaa can be any naturally occurring amino acid
  misc_feature (79)..(79): Xaa can be any naturally occurring amino acid
ESLHYYSTCLXFLXGAPSSQDXVMSRAYRGTQICXNLVACEGPXRVERHETLSQWSNRFGSSGFAPAHPGSNAFKQAEXLLALFNGGEGYRVEENNGCLMLSWHTRPLITTSAWKLSAVH

SEQ ID NO: 1237 - protein, 603 aa, Nicotiana tabacum
MMMFEEMGFCGDLDFFPAPLKEVEVAAPHTEPEPELVVDDDYSDEEIDMDELERRMWRDKMKLKRLKEMTKSKEGVDPAKHRQSQEQARRKKMSRAQDGILKYMLKMMEVCKAQGFVYGIIPEKGKPVGGASDNLREWWKDKVRFDRNGPAAIAKYQADHAIPGMNEGSNPVGPTPHTLQELQDTTLGSLLSALMQHCDPPQRRFPLEKGVSPPWWPTGQEDWWPQLGLQKEQGPPPYKKPHDLKKAWKVGVLTAVIKHMFPDIAKIRKLVRQSKCLQDKMTAKESATWLAIISQEEALARELYPDRCPALSSAGASGTFILDDSSEYDVEGAQDEPNFDVHEQKPNHLSLLNIGVERFKETLPLQQQSHPNKDEFITNLDFTRKRKQANELTVMMDQKIYTCEFQQCPHSELRNGFQGKSARDNHQFACPFRNSSQFGVSNFNFNEVKPVVFPQQYVQPKSASLPVNQGPPTFDLSGVGVPEDGQRMITELMSFYDSNIQGNKSQNTGNVALTKEQPHQQPRVNQDNYLHSQGIMEGNIFKDANISTSHSMLPQASPFNAGPNDNFHFMFGSPFNLQSANYTGNLPGIGYDTTPKQNLPTWY

SEQ ID NO: 1238 - protein, 608 aa, Nicotiana tabacum
MMMFEEMGFPGNFEFMSDPLGCGGDVAQEVEHKPTGVEENYSDEEMDVDELERRMWRYRMLWRRLKEKNKNKEVGGDGAKQRQSQEQARRKKMSRAQDGILKYMLKMMEVCNAQGFVYGIIPEKGKPVTGASDNLRAWWKEKVRFDRNGPAAIAKYQADNQIPGRIEDSSVIVSTPHTLQELQDTTLGSLLSALMQHCDPPQRRFPLEKGVAPPWWPSGKEEWWGQLGLPNDQVPPPYKKPHDLKKAWKVGVLTAVIKHISPDIAKIRKLVRQSKCLQDKMTAKESATWLAIINQEEALARKLYPDSCPQGSLAVGNGSYFISDTSDYDVEGVDDERNNEVECKPHDINLLTGIMVPKERILMPALAPVKGEIIDLTSDFIQKRKHPSFEESVDQKLYTCEYLHCPYSNYQAGFLDRTSRNNHQMDCPFRFNSAQRLGMPPKYQINNENNTVFPTQTATPKPATSSVTASSSMTVSGLGLPEDGQRMISDLFTFYDNNLQQNSSICSGNSKILANQNMQQNQTVELPMDDNFNLGHMEAEAQETSMTMNSAYTSTEFQYDQCKLPFDAPFTGNLNDITDYRFGSPFNMGGSDYSMDQLTKQDISTWYL

SEQ ID NO: 1239 - protein, 80 aa, Triticum aestivum
MSSPSSDSEWSKKENKMFEEALAYYGMGAPNLWEKVASAMGGTKSAEEVRRHFQFLVDDVKNIEHGRIPFPKYKTRGFWT

SEQ ID NO: 1240 - protein, 490 aa, Arabidopsis thaliana
MANQHFFKPLLPGFHTHLRIPVAFFLKNIEGRYEQKTAELRSDASKITWEVKIDGQRLTDGWKEFALSHDLRIGDIVVFRQERDMSFHVTMLGPSCCEIQYGSCSDEERNLEKKKNPNGEAKSSSLDPSCFSANVAPSSLRYDLMLFPMGFVRENGVVGSGKIVLMNEKGRSWNFNLRQKPSCGTVYVRGGWVSFCDANGLQAGDIYTFKLIKRGGTLVLRLLPKGAESCSLDPSCFVANVAPSTLRYDTLYLPKRFMRENGVDKRRGEMILMNEKGKSWTLDLKLKKSCGTSLIRRGWRSFCSANGLRAGSIITFKLIKKSGTLVLCLLSNEPEKEVCSEANEVESLSTDQESHEESSHNEKISRRKEKKGRMIWKASSSPSENRFVTLNLTPYNILRSALRLPIPFTRMNGINEETKMTLLDKHGMKWLTTLRLVDYKRKRLGMVGGWKGFIQANGVKANESIMLELIWEEETSCVLKFCSKVKLAIK

SEQ ID NO: 1241 - protein, 340 aa, Thellungiella salsuginea
MAVYDHSGDINRTQLDTSRKRKSRSRRDGTTVAERLKIWKEYNDTVEAASTKKRKVPAKGSKKGCMKGKGGPDNGRCSFRGVRQRIWGKWVAEIREPNRGSRLWLGTFPTAEEAASAYDEAAKAMYGPSARLNFPESTVSDVTSTSSQSEVCTIEPSGDVHVKTEDADCESKPFFSDAWTMHHMEENGACGGVEEIMKDVKADANVGVTDKDWLSEYEHKYWSAVLKEREKHKEQAVADTCQQQPLDSLSVSDYGWPDDLAQGHWDSSEMFDVAELLGDLNGDIFTGLNPGNNVVSGLCELEKQQIGLQGLNSDYGLPPLQLEAQDGNELFDLSFLDMAK

SEQ ID NO: 1242 - protein, 249 aa, Arabidopsis thaliana
MDDGELEFSNSNMGGELPSCSMDSFFDELLRDSHACTHTHTCNPPGPENTHTHTCLHVHTKILPDKVSTDDTSESSGKKRPLGNREAVRKYREKKKAKAASLEDEVMRLKAVNNQLLKRLQGQAALEAEVTRLKCLLVDIRGRIDGEIGAFPYQKPAVTNVPYSYMMHPCNMQCDVDNLYCLQNGNNGEGASMNEQGLNGCEFDQLECLANQNLAGKEIPVCSNGIGTFTVNGSGVNKRKGEPRAAKAV

SEQ ID NO: 1243 - protein, 270 aa, Tradescantia fluminensis
MGRSPCCEKAHTNKGAWTKEEDQRLIAYIKVHGEGCWRSLPKSAGLLRCGKSCRLRWINYLRPDLKRGNFTEEEDEVIIKLHALLGNKWSLIAGRLPGRTDNEIKNYWNTHIKRKLISRGIDPQTHRPVNSGAQFTISSANNQANSTKIPVNEALKQSTDSSSSQDMQSSNSVLDVVERCPDLNLDLSINIAYSTDRKPFSSSTEMQITPAATEATTPTSVSPYFQPICLCYRLGFSRTEACSCKAISNSNSQNVFRYYRPLKEEGHQTN

SEQ ID NO: 1244 - protein, 136 aa, Triticum aestivum
  misc_feature (87)..(87): Xaa can be any naturally occurring amino acid
  misc_feature (95)..(95): Xaa can be any naturally occurring amino acid
  misc_feature (114)..(114): Xaa can be any naturally occurring amino acid
NALSADSGMSNPAVKEDDSSLCIPVRQAISYSGFTGESIPEEYQDCGVSPMLLMGEPPWLPPGPDGSFAGIRDSAITRYKEKKKRRXFDHKIRYXTRKAKAVLRKRSKGRFVKXGEAYDYDPLDTRTECKKTLWVD

SEQ ID NO: 1245 - protein, 136 aa, Brassica napus
  misc_feature (133)..(133): Xaa can be any naturally occurring amino acid
INSVAVTTCGLAREALRLLRERKDGYDIVISDVNMPDMDGFKLLEHVGLELDLPVIMMSVDGETKRVMKGVQHGACDYLLKPIRMKELKIIWQHVLRKKLQEVRDIEGCYEGGADWFTRNDEAHLLGGGGEDXSFG

SEQ ID NO: 1246 - protein, 368 aa, Populus tomentosa
MEDYNQMSENTTPRGNFLYASQLLAPNSSPYGRTSSGSTVSNQQTQMPLNPFHLQSNDQCFQSDTHPIVKTEASTSHAQKFHYPLLRGYQTINQQQQGSESSSEVEAIKAKIIAHPQYSNLLEAYMDCQKVGAPPEVVARLAAARQEFESRQRSFITSRDNSKDPELDQFMEAYCDMLVKYREELTRPIQEAMDFMRRIETQLNMICHGPLRIFNSDDKSEGVGSSEDDQDNSGGETELPEIDPRAEDRELKNHLLRKYSGYLGSLKQELSKKKKKGKLPKEARQKLLSWWELHYKWPYPSETEKVALAETTGLDQKQINNWFINQRKRHWKPSEDMQFMVMDGLHPQNAALYMDGHYMGDGHYRLGP

SEQ ID NO: 1247 - protein, 205 aa, Zea mays
MATADSLAGSGSRLKGQLSFSSRQGSLMSQISEMDSEEVGGSSPEAAGGGRGYIPGYPMGSGSGWEDSSALMSDNLSGLKRPRDSSEPGQSRITHQFSLPKTSSEMASIDKFLQFQDAVPCKIRAKRGCATHPRSIAERVRRTKISERIRKLQELVPNMDKQTNTSDMLDLAVDYIKDLQKQVKVLKETQANCTCPASKSQQHSC

SEQ ID NO: 1248 - protein, 248 aa, Gibberella zeae PH-1
MSDSPQSPPKEVDQGAPSPDDEAQMNEQQDPQSANAAGYEFEGVKEQDRWLPIANARSAVHIWIPLMSCDSSSKSPKASRASKADRADELDANIRNFAPVARIMKNALPDNAKIAKEAKECMQECVSEFISFITSEASEKCQQEKRKTVNGEDILFAMTSLGFENYAEALKVYLSKYREQQNQSNRERVNMDNGQWGSGTMMGDAKAESGAVGDFGHDGNSVESGADPNYMYGSQPGHNGNAPEARER

SEQ ID NO: 1249 - protein, 204 aa, Triticum aestivum
HEAFPTPPRSANHRLLLPPPFSPLRSSPPARAFFIRVSGRGMADDDSGSPRGGGGVREQDRFLPIANISRIMKKAVPANGKIAKDAKETLQECVSEFISFVTSEASDKCQKEKRKTINGDDLLWAMATLGFEEYVDPLKIYLQKYRDMEGDSKLTSKSGEGSVKKDIIGAHSGATSSNAQAMVQHGAYAQGMGYMQPQYHNGDT

SEQ ID NO: 1250 - protein, 144 aa, Brassica napus
MTIRSLIQEMRSRPHRVVHEAASPTPGSEPFRWSELPDELLREILIRVESADDGDWPSRRSVVACAGVCRVWRMIVKEIVGVPELSSKLTFPISLKQPGPPPPLVPCSLKRFPPTQPFPPPLPSHLLPYTLLHPLVLHYSILPP

SEQ ID NO: 1251 - protein, 358 aa, Triticum aestivum
  misc_feature (246)..(246): Xaa can be any naturally occurring amino acid
LGLINQCLRNLKVAGNGESNEASLQLSNVIMIESEDFKTNVHFENSEGFRESPEGDTHGGAHEFDKANSKVSEGHLLADDNSQNNGVSVSRPNGSAASDSSLLHKNGKPPERRRGKAETTISLEVLQQYFSGSLKNAAKSLGVCPTTMKRICRQHGISRWPSRKINKVNRSLSKLKQVIESVQGSDAAFNLTSITGPLPTIPVGPSSDSFNKEKASESKAEHSNRAVDGDKDSSLQKSQETGSPLXALMSQPGFADTGNHGQLEADKASLSRSSSGRRQPKFPVTSEASCQGSPANQTFVCQPIASMFLEPQEPQLNPEGFTKEPFQEPELPLSRMLIEDSGSSKDFKNFWFQHGHTS

SEQ ID NO: 1252 - protein, 105 aa, Candida albicans SC5314
MNQQNARDIELREQDRWLPIANVARIMKNTLPPTAKVSKDAKECMQECVSEFISFITSEASDKCLKEKRKTINGEDILYSMYDLGFENYAEVLKIYLAKYREARK

SEQ ID NO: 1253 - protein, 39 aa, Arabidopsis
  misc_feature (1)..(1): Xaa can be any naturally occurring amino acid
  misc_feature (39)..(39): Xaa can be any naturally occurring amino acid
XWPPRSYTCSFCKREFRSAQALGGHMNVHRRDRARLRLX

SEQ ID NO: 1254 - protein, 275 aa, Arabidopsis thaliana
MSGEGNLGKDHEEENEAPLPGFRFHPTDEELLGYYLRRKVENKTIKLELIKQIDIYKYDPWDLPRVSSVGEKEWYFFCMRGRKYRNSVRPNRVTGSGFWKATGIDKPVYSNLDCVGLKKSLVYYLGSAGKGTKTDWMMHEFRLPSTTKTDSPAQQAEVWTLCRIFKRVTSQRNPTILPPNRKPVITLTDTCSKTSSLDSDHTSHRTVDSMSHEPPLPQPQNPYWNQHIVGFNQPTYTGNDNNLLMSFWNGNGGDFIGDSASWDELRSVIDGNTKP

SEQ ID NO: 1255 - protein, 392 aa, Zea mays
  misc_feature (225)..(225): Xaa can be any naturally occurring amino acid
LLEWPSRRLLASCIKSIHDIYTSDIDRTPDRLSWQVERSTMVAKVKRDGEVLVAAATGDSEEQDDLVLPGFRFHPTDEELVSFYLRRKVARKPLSMEIIKEMDIYKHDPWDLPKASTVGGEKEWYFFCLRGRKYRNSIRPNRVTGSGFWKATGIDRPIYPAAAGESVSVGLKKSLVYYRGSAGKGAKTDWMMHEFRLPPAAASPSPTPTSMQEAEVWTICRIFKXNIAYKRQPQLPAWRQQQQSSSNTGSFESDGGGGGDEYMNRCLPVPATATATAHQIGGMLNGGGVVSATGSSSSSFFRDRESVHGGQQFHFHEQWLSRFPAAPAVEQKPQLLDPSAMAIAFHQNDDQSVATAAAAAASECCKDGYYWDEIARFMEVNDPTVLHDCRYA

SEQ ID NO: 1256 - protein, 521 aa, Zea mays
  misc_feature (272)..(272): Xaa can be any naturally occurring amino acid
MSDADAAGSKEAPRCDYCMGLPAVVYCRADSARLCLPCDRHVHGANTVSTRHARAPLCARCRAAAATAVASPRGGGGGFVCADCYCLEKEDEEKGEEHRDPRPLHHDHDAVEEYAGCPSIAELAAILGVAGYDEKAAAAGGDVGWWSTWEEPQVVCLEDVVVPTTSCHGLQPLLAPPSPKNRSSGGELADVVIRQLEELAKSEAAAVAASYAELEPGGGEQLPPWASPELDIGAAADFGALDADADADADADAAWQWHDAATTAFAAVPSHXEQEAWIATGCDVDARRAEVEETREQAAPAPVEPCLSSFVDMSEIFPASVTLSSGGDVDNSGNKPDEETAPRPQLLATTALVPVTEKKGGYDVAHPDRGTVISRYKEKRKNRRFGKQIRYESRKARADGRMRIKGRFAKSGEGARACLSGRQTHSRVILVSKLLRQMANAWNAEIGYRKSWRALWGRYSAPLIWGTCASSPTAVAGRGPFSLRRYSSGVTLNGLNGYRASGVILNGYRAKECECGGCRCS

SEQ ID NO: 1257 - protein, 455 aa, Arabidopsis thaliana
MMMNRDILFHQQQQQQMEENMSNLTSASGDQASVSSGNRTETSGSNINQHHQEQCFVPQSSLKRKRNQPGNPDPEAEVMALSPKTLMATNRFICEVCNKGFQRDQNLQLHKRGHNLPWKLKQRSNKDVVRKKVYVCPEPGCVHHHPSRALGDLTGIKKHFFRKHGEKKWKCEKCSKKYAVQSDWKAHAKTCGTKEYKCDCGTLFSRRDSFITHRAFCDALAEESARAMPNPIMIQASNSPHHHHHQTQQNIGFSSSSQNIISNSNLHGPMKQEESQHHYQNIPPWLISSNPNPNGNNGNLFPPVASSVNTGRSSFPHPSPAMSATALLQKAAQMGSTKSTTPEEEERSSRSSYNNLITTTMAAMMTSPPEPGFGFQDYYMMNHQHHGGGEAFNGGFVPGEEKNDVVDDGGGETRDFLGLRSLMSHNEILSFANNLGNCLNTSATEQQQQQHSHQD

SEQ ID NO: 1258 - protein, 227 aa, Momordica charantia
MGRGKIEIKRIENTTNRQVTFCKRRNGLLKKAYELSVLCDAEVALIVFSSRGRLYEYSNNSIKTTIGRYKKACSDSSATSSVTELNTQYYQQESAKLRQQIQMLQNSNSNLVRHLMGDSLSALTVKELKQLENRLERGITRIRSKKHEMLLAEIEYLQKREIELENENVCIRTKIAEVERLQQANMVSGQELNAIQALASRNFFTPNMMEGGAVTFSHQDKKMLHLG

SEQ ID NO: 1259 - protein, 162 aa, Glycine max
MDADSSGEEVVIKTRKPYTITKQRERWTEEEHNRFLEALKLYGRAWQRIEEHIGTKTAVQIRSHAQKFFTKLEKEAFVKGVPIGQALDIDIPPPRPKRKPSNPYPRKTNVGAPTLHSEAKHGKSLISIASSHGKQALDLEKEPLPEKHNVDLRPTTVKKKKK

SEQ ID NO: 1260 - protein, 271 aa, Triticum aestivum
  misc_feature (65)..(65): Xaa can be any naturally occurring amino acid
  misc_feature (124)..(124): Xaa can be any naturally occurring amino acid
  misc_feature (139)..(139): Xaa can be any naturally occurring amino acid
  misc_feature (239)..(239): Xaa can be any naturally occurring amino acid
  misc_feature (247)..(247): Xaa can be any naturally occurring amino acid
  misc_feature (266)..(266): Xaa can be any naturally occurring amino acid
MEEEGARKAVLFRLFGVEVRGAEEDDDAEPMELKKSTSMPNLACASIVPILLPGEASNDKGYASXDDGELASTPQLKRRRRKAQERKKGIPWTEEEHRKFLEGLKQLGKGDWRGISKNFVTTRXATQVASHAQKYFLRXQTKPGKKKRRASLFDVGIPAGHSYDDQLPSPQSVGTKLAPAEKILHTDRGDVPLPSYPGGIRGNSNNIQMQVEELTDHVKKRSKFPTGTSLAAMAASGLXELAMSSSXPSSILELSIAPPRCYGAVXAIKVL

SEQ ID NO: 1261 - protein, 268 aa, Tradescantia fluminensis
MGRSPCCEKAHTNKGAWTKEEDQRLIAYIKVHGEGCWRSLPKAAGLLRCGKSCRLRWINYLRPDLKRGNFTEEEDELIIKLHALLGNKWSLIAGRLPGRTDNEIKNYWNTHIKRKLISRGIDPQTHRPINAGSQFTISSANHQGSLKNIRDNEALKQSPNSSSQDMQSNSSVIDVVERCPDLNLDIAINIAYSTDQKPFSSSTEVQKAPAVTQATTPTSVSPYFQPICLCYNLGFSKSEACSCRASSNDNQHVLRYYRPLIEEGHQTN

SEQ ID NO: 1262 - protein, 245 aa, Glycine max
MGRGRVELKRIENKINRQVTFSKRRNGLLKKAYELSVLCDAEVALIIFSSRGKLYEFGSVGTTNTIERYQRSSFTPQDEHVECETQSWYQEVSKLKAKYESLQRTQRHLLGEDLGPLNIKELQNIEKQLEGALAQARQRKTQIMIEQMEELRRRERHLGDMNKQLRLKLEAEGFNLKATESLLSFTSAAGNSGFHFQQPPQTNPIDYQQPEPFLQIGYHQYVQSEASNVPKSMACETNFMQGWIL

SEQ ID NO: 1263 - protein, 374 aa, Glycine max
MINSTKETDFPLKQEGLSSSDHEKAKAPSSSSSSQWLKLKDPRIVRVSRAFGGKDRHSKVCTIRGLRDRRVRLSVPTAIHLYDLQDRLGLNQPSKVVDWLLNAAKHEIDELPPLPIPPGNFTLGYPSLVSCNEVSTSREGSGQNTLLWKPKPGEIMVSDHDKANWMNRREGDDDDDNNHNNSNGDKQGSNNNCHGGALVLPNNLLPTRPNHPSFLGLMNTMPSLGYQWEPNSSAADVNVQWQNHGFFNQTDVHSIDVVPFPSTLALSTGNSTSTTTTSQILVCPPPPGATTQPYFPSSHFATMEMNARQINHYQMLSSSSHQNLLANSLNHPSSQQLMSQSGKAPFSLRIRPKLFHSPNSSESHSQKDQDFPSK

SEQ ID NO: 1264 - protein, 244 aa, Eucalyptus globulus
MGRGRLQLKRIENKINRQITFSKRRAGLLKKAHEISVLCDAEVALIVFSAKGKLFEYSTDSCMERILERYERYSYAEHQVLASETESIGSWTLEHAKLKARLEVLHRNYRHFMGEDLDSLSLKDLQNLEQQLESALKHIRSRKNQLMHESISVLQKKDRALQEQNNLLTKKIKEKERALAQQAQWEQQDHALDSPVVLPHYLPSLDINGSYQARHNGHDDGENLTQPRAGTLLPPWISASQLRL

SEQ ID NO: 1265 - protein, 400 aa, Oryza sativa
MGHHCCSKQKVKRGLWSPEEDEKLVRYISEHGHSCWSSVPKHAGLQRCGKSCRLRWINYLRPDLKRGTFSEQEERTIIDVHRILGNRWAQIAKHLPGRTDNEVKNFWNSCIKKKLIAQGLDPKTHNLLPASKTLLHGGGGGGAANPSGNGLAQFQSNNGAAAAGTTPFTISSPAKAAAYDVAPPALYDVVLPANPAGGMLMAHDHHHHHQVAAAAAPVGYPYADHGGNGGGVLMSFRDQNAGVHGAASMDFMNGSSSSSSMEQLGGGGGMSSNGNGSFSASMAAFMDEEAAMWATAVAPPGMGGLAGMDQVAQQQQQQQVLVQDAAVGVAPTTLMMHGGGAATAGAMVVDKSVEMVDVSSAVYGGATATAFDLDLMVESCGMFCGGGGAGNAMEQLQWDC

SEQ ID NO: 1266 - protein, 276 aa, Capsicum annuum
MDTSSLDLIRQHLLDDDVVFMENYCTSSETTSTLYSQSSSSSESLESFVSELKTESNFSFYPESSNLEFCSFFNNNSKMEFNPSEFQVKPQKKKSFNERKPLLNISIPSVKKTDESKTGENSEKKRYRGVRQRPWGKFAAEIRDPNRKGTRVWLGTFDTAVDAAMAYDRAAFKLRGSKAILNFPLEVSNFRQENNEIEKKVNLNSCGKRAREEIENEDQVVMKKEVKREQMVATPLTPSSWAPIWDCGNAKGIFEVPPLSPLSPHPSFGFSQLLVS

SEQ ID NO: 1267 - protein, 213 aa, Arabidopsis thaliana
  misc_feature (31)..(31): Xaa can be any naturally occurring amino acid
MYGQCNIESDYALLESITRHLLGGGGHVGVXALLKDAFHFDTSSSDLSCLFDFPAVKVEPTENFTAMEEKPKKAIPVTETAVKAKHYRGVRQRPWGKFAAEIRDPAKNGARVWLGTFETAEDAALAYDIAAFRMRGSRALLNFPLRVNSGEPDPVRITSKRSSSSSSSSSSSTSSSENGKLKRRRKAENLTSEVVQVKCEVGDETRVDELLVS

SEQ ID NO: 1268 - protein, 191 aa, Lycopersicon esculentum
GDSMSTWTRDDDKLFEHGLVLYPENSADRWQLIADHVPGKTADDIMAHYDDLVHDVYEIDSGRIDLPSYTDDPVELEGDCQITSGSNKKSNEIERKKGTPWTEDEHRLFLIGLDKYGKGDWRSISRNVVVSRTPTQVASHAQKYFIRQQAMKKERKRSSIHDITTAVDTNPVPPQSSFQNQSGSQNFNFAM

SEQ ID NO: 1269 - protein, 149 aa, Triticum aestivum
TNHHPPPPSSSPRPRHSAETRRFSARKQVVSLSPSKRRAPPPMARPQQRYRGVRQRHWGSWVSEIRHPLLKTRIWLGTFETAEDAARAYDEAARIMCGPRVRTNFPDNDAGAPSSSFLSPALVAKLHRFNVACGSQAAQQQQDKDASAS

SEQ ID NO: 1270 - protein, 243 aa, Agapanthus praecox
MGRGRVELKRIENKINRQVTFSKRRNGLLKKAYELSVLCDAEVALIVFSSRGKLYEFGSAGTSKTLERYQRCCYTSQDATIADREKQNWYQEVARLKAKFESLQSAQRHLLGEDLGPLSVKELQQLERQLEASLSQARQRKTQIMFDQMEELRKKEHHLGEINKQLKTKLEAEGENLRAIQGSWESDATNVGGGNVFSMHPSHSSAMECEPTLQIGYHQLVQPEGSLPRNSGGENNFMLGWVL

SEQ ID NO: 1271 - protein, 210 aa, Eucalyptus occidentalis
MVRGKIQLRRIENTTSRQVTFSKRRNGLLKKAYELSVLCDAEVAVIIFSQKGRPYEFSSNSEIQKTIDRYRRSTYDMDTYKTNLDQCILHLKQETTDMERKIELLEVSLRKLSGECLGSCSIDEIQMIGDQLERSLSSIRARKAQLFDDQIQHLQAKERSLKEENAKLLAKCLANPGQSTAHPRAAALHSRSSRSTDVETRLFIGLPELN

SEQ ID NO: 1272 - protein, 419 aa, Hordeum vulgare
MTVDRKGAQAAAAAAATSAPFEIPALQPGRTCGAEESTRSHVLVEPIGSSDLLCNEYALLAQQNPKGDALPVASILRKKRPRRSRDGPNSVSETIKRWKEVNQQLEHDPQGAKRARKPPAKGSKKGCMQGKGGPENTQCGFRGVRQRTWGKWVAEIREPNRVSRLWLGTFPTAEVAAQAYDEAARAMYGPLARTNFPVQDAQAAPAVAVPVATEGVVRGSSASCESTTTSNHSDVASSSHNKQRQIQAPEISSRSDLLESTQSVEYSQQQSVPDAVSSIAMSTSEEDVYEPLEPISNLPDGEADCFDIEELLKLMEADPVEVDPVTVGSWNEFQDAGANARGSWNEFQCARANTGVSWNANAGMEMGQQEPLYLDGLDQGMLEGMLHSDYPFPVWISEDRPMHNPAFHDAEMSEFFEGL

SEQ ID NO: 1273 - protein, 262 aa, Nicotiana tabacum
  misc_feature (218)..(218): Xaa can be any naturally occurring amino acid
MDTSHWPQGIGLVKAVEPSKPVPTERKPRPQKEQAINCPRCNSTNTKFCYYNNYSLSQPRYFCKTCRRYWTEGGSLRNVPVGGGSRKNKRSSSSSNNSSSSTSSSYKKIPDLTIPTSSQNPKIINEPHDLNLAFNPSATSNFSNISEFMALPLMNPNSTTSFMSSIMPQLSDSNNIMYSSSSTGLPNLHDLKPTLNFSLDGFDNNNGYGSLQGETAGXKLFFPLDDLKNVSTPNDDHEFDEQNRGQAAESHGFWNGMLGGGS

SEQ ID NO: 1274 - protein, 248 aa, Helianthus annuus
MSFQNEDSGDISPQRRIGKGKIEIKRIENTTNRQVTFCKRRNGLLKKAYELSVLCDAEVALIVFSSRGRLYEYANNSVTGTIDRYKKSCLDPPSTGSVAEANAQFYQQEATKLRQQIANLQNQNRQFYRNIMGESLADMPGKELKNLESKLEKAINRIRAKKNELLFAEIEYMQKRELELHNSNQFLRARIAENERAQQQHMSLMPGSSGYNDLGPHQSFDGLNDLQTNELQLNNNYSCQDQTPLQLV

SEQ ID NO: 1275 - protein, 224 aa, Oryza sativa
MARGKVQLRRIENPVHRQVTFCKRRAGLLKKARELSILCEADIGIIIFSAHGKLYDLATTGTMEELIERYKSASGEQANACGDQRMDPKQEAMVLKQEINLLQKGLRYIYGNRANEHMTVEELNALERYLEIWMYNIRSAKMQIMIQEIQALKSKEGMLKAANEILQEKIVEQNGLIDVGMMVADQQNGHFSTVPLLEEITNPLTILSGYSTCRGSENGLFLLT

SEQ ID NO: 1276 - protein, 367 aa, Acidobacteria bacterium Ellin345
MPTDRILVVDDEEPIREIVSSMLSNAGYKTQQAGSGLQALAVLESGEEFELMLSDLMMAELDGIGLLEKTKERYPDMPVVMVTAVHDISVALAAIRNGAYDYLLKPFEREQLLAMVRRALENRRLKLENRAYQTNLESLVSARTEQLRQAMADLERSYDITLEALGDALDLKDAETEGHSKRVTAFTIAIARAMGLETEKIRVIARGAFLHDIGKMAIPDAILRKPGPLTPEEVAIMREHCYRGYHMLRKIPFLYEAAEIVYAHQEFYDGTGYPRGLKGEQIPLGSRIFAVADTLDAITSDRPYRAAQSIQAAREEIAQWSARQFDPKVVDTFLQMPDTIWRDLRREIDQQVYRFAYAQKNTKVGNA

SEQ ID NO: 1277 - protein, 222 aa, Platanus x acerifolia
IGKLRSNFLGTKFTIYDGQPPHAGATVTKSRSTRLVGLKQVSPRIPAGNYSVAHISYEVNVLGSRGPRRMQCVMDAIPASAIEPGGVAPTQTELPLSNADSFPLLPFFRSKSTRTENHLQPGPLVSQKDGVLVLKNKAPRWHEQLQCWCLNFRGRVTVASVKNFQLVASPGNGPAGQEHEEVILQFGKVGKDLFTMDYQYPISAFQAFAICLSSFDTKIACE

SEQ ID NO: 1278 - protein, 645 aa, Arabidopsis thaliana
MDTNTSGEELLAKARKPYTITKQRERWTEDEHERFLEALRLYGRAWQRIEEHIGTKTAVQIRSHAQKFFTKLEKEAEVKGIPVCQALDIEIPPPRPKRKPNTPYPRKPGNNGTSSSQVSSAKDAKLVSSASSSQLNQAFLDLEKMPFSEKTSTGKENQDENCSGVSTVNKYPLPTKQVSGDIETSKTSTVDNAVQDVPKKNKDKDGNDGTTVHSMQNYPWHFHADIVNGNIAKCPQNHPSGMVSQDFMFHPMREETHGHANLQATTASATTTASHQAFPACHSQDDYRSFLQISSTFSNLIMSTLLQNPAAHAAATFAASVWPYASVGNSGDSSTPMSSSPPSITAIAAATVAAATAWWASHGLLPVCAPAPITCVPFSTVAVPTPAMTEMDTVENTQPFEKQNTALQDQNLASKSPASSSDDSDETGVTKLNADSKTNDDKIEEVVVTAAVHDSNTAQKKNLVDRSSCGSNTPSGSDAETDALDKMEKDKEDVKETDENQPDVIELNNRKIKMRDNNSNNNATTDSWKEVSEEGRIAFQALFARERLPQSFSPPQVAENVNRKQSDTSMPLAPNFKSQDSCAADQEGVVMIGVGTCKSLKTRQTGFKPYKRCSMEVKESQVGNINNQSDEKVCKRLRLEGEAST

SEQ ID NO: 1279 - protein, 280 aa, Prunus armeniaca
EKSAKRKRKNQYRGIRQRPWGKWAAEIRDPRKGVRVWLGTFNTAEEAARAYDSEARRIRGKKAKVNFPDETPRSSAKRSVKANPQKMQPKTNMNAIQPNLNQNINFVNDPNQDYYNAMGFLDEKPPTNNFGFMSTFPANDVALKSSTPSDAVPLYFGSDQGSNSFDCSDFGWGEQGSKTPEISSVLSSVMEESDDSLFLEDASPTKKLRSNPEDLVPVQDNAGKTLTDELSAFEMKYFQTPYLDGSWDASVDAFLSGDATQDGGNSVDLWCFDDLVGGGF

SEQ ID NO: 1280 - protein, 271 aa, Medicago truncatula
MESSASSELPPGFRFHPTDEELIVHYLCNQATSKPCPASIIPEVDIYKFDPWELPDKSEFEENEWYFFSPRERKYPNGVRPNRATLSGYWKATGTDKAIKSGSKQIGVKKSLVFYKGRPPKGVKTDWIMHEYRLIGSQKQTSKHIGSMRLDDWVLCRIYKKKHMGKTLQQKEDYSTHQFNDSIITNNDDGELEMMNLTRSCSLTYLLDMNYFGPILSDGSTLDFQINNSNIGIDPYVKPQPVEMTNHYEADSHSSITNQPIFVKQMHNYLA

SEQ ID NO: 1281 - protein, 237 aa, Arabidopsis thaliana
MEAEEGHQRDRLCDYCDSSVALVYCKADSAKLCLACDKQVHVANQLFAKHFRSLLCDSCNESPSSLFCETERSVLCQNCDWQHHTASSSLHSRRPFEGFTGCPSVPELLAIVGLDDLTLDSGLLWESPEIVSLNDLIVSGGSGTHNFRATDVPPLPKNRHATCGKYKDEMIRQLRGLSRSEPGCLKFETPDAEIDAGFQFLAPDLFSTCELVIETAIGCVFLCLSNDFPAYKSLLSI

SEQ ID NO: 1282 - protein, 348 aa, Sorghum bicolor
FGVGASSHSHGHGHGQHHHHHHPWASSLSAVVAPPPQQPPTAGLPLTLNTVAATGNSGASGNPVLQLANGGSLLDACVNVKAKGEPSSSSPYAGDLEAIKAKIISHPHYYSLLAAYLECKKVGAPPDVSARLTAMAQELEARQRTALSGLGAATEPELDQFMEAYHEMLVKFKEELTRPLQEAMEFMRRVESQLNSLSISGRSLRNILSSGSSEEDQEGSGGETELPEVDVHGVDQELKHHLLKKYSGYLSSLKQELSKKMKKGKLPREARQQHLSWWDLHYKWPYPSETQKVALAESTGLDLKQINNWFINQRKRHWKPSEEMHHLMMDGYYTNTFFMDGHFINDGG

SEQ ID NO: 1283 - protein, 192 aa, Triticum aestivum
MDRKDKSRKSSSAASMAALAAAAAAGDVARADGMSGEEDQKLKLVNVPVVSVGGSSSSAAAVAVRRGSGAAGAVATGAAGAGGPSCQAERCGADLSEAKRYHRRHKVCEAHAKAAVVVVAGLRQRFCQQCSRFHELLEFDDQKRSCRRRLAGHNERRRKSSAEANGGDGCRHADQDGRSHPGNPPLNHFQIR

SEQ ID NO: 1284 - protein, 344 aa, Setaria italica
FGVGASGGHGHVQDHLHHHHPWGSSLSAVVAPPPQTPPSAGLPLTLNTAATGNSGGAGGNPVLQLANGGGLLDACVKAKEPSSSSPYAGDVDAIRAKIISHPHYYSLLAAYLECQKVGAPPEVSARLTAMAQELEARQRTALGGLGAATEPELDQFMEAYHEMLVKFREELTRPLQEAMEFMRRVESQLNSLSISGRSLRNILSSGSSEEDQEGSGGETEIPEVDAHGEDQELKHHLLKKYSGYLSSLKQELSKKKKKGKLPKEARQHLLSWRDLHYKWPYPSETQKVALAESTGLDLKQIINWFINQRKRHWKPSEEMHHLMMDGYHTTGAFYMDGHFINDSG

SEQ ID NO: 1285 - protein, 112 aa, Brassica napus
  misc_feature (108)..(108): Xaa can be any naturally occurring amino acid
MMFNEMGMCGNMDFFSPASLGEVDFCPAPTHPEPDSVVDDDYTDDEIDVDELERRMWRDKMRLKRLKEQDKSGSKEGVDAAKQRQSQEQARRKKMSRAQDGILKYMLXMMEV

SEQ ID NO: 1286 - protein, 156 aa, Triticum aestivum
  misc_feature (97)..(97): Xaa can be any naturally occurring amino acid
  misc_feature (103)..(103): Xaa can be any naturally occurring amino acid
  misc_feature (117)..(117): Xaa can be any naturally occurring amino acid
  misc_feature (119)..(119): Xaa can be any naturally occurring amino acid
  misc_feature (129)..(129): Xaa can be any naturally occurring amino acid
  misc_feature (142)..(143): Xaa can be any naturally occurring amino acid
VNLKSTEILEHPNVQICNEGRQSALVEILEILTVVCEEHKLPLAQTWVPCKYRSVLAHGGGVKKSCLSFDGSCMGEVCMSTSDVAFHVIDAHMWGFXRDACVXEHHLQKGQGVPGKXFXQHRPCFSKEXQFCKLDTPCALSXXLGLAGCLPNVTLN

SEQ ID NO: 1287 - protein, 334 aa, Chasmanthium latifolium
FGVGASGHSQQQQQHHHPWVSALSAVVAPAPSAGLPLTLNTAATGSSGGNPVLQLANGGSLLDACVKAKELSSSSPYAGDVDAIKAKIISHPHYYSLLAAYLECQKVGAPPEVSARLTAMAQELEARQRTAFGGLGNATEPELDQFMEAYHEMLVKFREELTRPLQEALEFMRRVESQLNSLSISGRSLRNILSSGSSEEDQEGSGGETELPEVDAHGVDQELKHHLLKKYSGYLSSLKQELSKKKKKGTLPKEARQQLLSWWDLHYKWPYPSETQKVALAESTGLNLKQINNWFINQRKRHWKPSEEMHHLMMDGYHTTNAFYMDGTSSTTAG

SEQ ID NO: 1288 - protein, 540 aa, Dubautia arborea
MKRSRERKKEAKTTSSVPDSGGMDELLEVLGYKVKSTDMADVAQKLEQLEMVMGEDGVLQLSDTVHYNPSDLSGWVQSMLSVLNENNNTPPSDHIVLSGDSSTTMIDFSNSSEIVVHGKQGSKMHEDDPYDLRAIAGGAIYGGESESSVRGNGNGNGIKRMKSTAVGSVDVQPESPRRVVLVDSQEAGIRLVHTLMACAEAIQHNDLKLADALVKHVGILVASQAGAMAKVATYFAGALAQRIYNIYPQNALETSCYEILQMHFYETCPYLKFAHFTANQAILEAFAGATRVHVIDFSLKQGMQWPALMQALALRSGGPPAFRLTGIGPPQPDNSDALQQVGWKLAQLADTIGVEFEFRGFVANSIADIDANMLNIRASETEVVAVNSVFEVHRLLARPGAVEKVLSGITKMKPKIVTLVEQESNHNGAVFMERFNEALHYYSTMFDSLESSALTLPNSQDDLVMSEVYLGRQICNVVACEGADRVERHETLTQWRVRMNSAGFEPVHLGSNAFKQASMLLALFAGGDGYRVEENDGCLM

SEQ ID NO: 1289 - protein, 212 aa, Triticum aestivum
MPESDNDSGGPSNTGGEGELSSPREQDRFLPIANVSRIMKKALPANAKISKDAKETVQECVSEFISFITGEASDKCQREKRKTINGDDLLWAMTTLGFEDYVDPLKHYLHKFREIEGERAAATSTSTAPQHLPDNNATGYADYGGAAVPAPAPGGMMMMGQPMYGSPPPQQHQQQQHQHQVAMGGRAGFPYHGGSSGGGGSSSSSGFGRKEG

SEQ ID NO: 1290 - protein, 538 aa, Dubautia arborea
MKRSRERKKEAKTTSSVPDSGGMDELLEVLGYKVKSTDMADVAQKLEQLEMVMGEDGVLQLSDTVHYNPSDLSGWVQSMLSVLNENTPPSDHIVLSGDSSTTMIDFSNSSEIVVHGKQGSKMHEDDPYDLRAIAGGAIYGGESESSVRGNGNGNGIKRMKSTAVGSVDVQPESPRRVVLVDSQEAGIRLVHTLMACAEAIQHNDLKLADALVKHVGILVASQAGAMAKVATYFAGALAQRIYNIYPQNALETSCYEILQMHFYETCPYLKFAHFTANQAILEAFAGATRVHVIDFSLKQGMQWPALMQALALRSGGPPAFRLTGIGPPQPDNSDALQQVGWKLAQLADTIGVEFEFRGFVANSIADIDANMLNIRASETEVVAVNSVFEVHRLLARPGAVEKVLSGITKMKPKIVTLVEQESNHNGAVFMERFNEALHYYSTMFDSLESSALTLPNSQDDLVMSEVYLGRQICNVVACEGADRVERHETLTQWRVRMNSAGFEPVHLGSNAFKQASMLLALFAGGDGYRVEENDGCLM

SEQ ID NO: 1291 - protein, 711 aa, Glycine max
  misc_feature (181)..(181): Xaa can be any naturally occurring amino acid
  misc_feature (197)..(197): Xaa can be any naturally occurring amino acid
LQTVNLRSSEILDHPHTQICNEGRQNALSEILEILTVVCETHNLPLAQTWIPCKHRSVLAQGGGVKKSCSSFDGRCMGKVCMSTTDIAFYIIDAHLWGFREACVEHHLQQGQGVAGRAFLSHGMCFCSNITQFYKTDYPLVHYALMFGLTSCFGICLVSSLTGNDDYVGEFLFSPPLTHMXGGPPPTISYVGPPPPXFQSLKIASGVELEDGSIEIIEATIERVHTRHESIPITPSIKSPPRLDTSPNMGEEVPQDPSEQQILMYCNDMNDGRSLGKNADGIDHMPSIETKNIKKPLERKRGKTEKSISLEVLQRYFAGSLKDAAKSLGVCPTTMKRICRQHGISRWPSRKINKVNRSLSKLKRVIESVQGAEGAFGLNSLSKSPLPIAVGSFPEPSTPNKFSQSASLSIKPSEPQVKENELNASKALEANRQAGMEDQLLGGRTQNLEKVINDKGGYTREVGREPKRTRTRNGSSEDSTNPTSHGSCHDSPPNESSPVKDIFITSNNDQCAGIKRSPESTLQPTINTPSRPTAYPMPDFVAVELQEPFGGMLIEDAGSSKDLRNLCPLVAEVILEDMIPEACGTNLPGPDLSPKLSMGTPNKAVTPFAAMKEMKTVTIKATYREDIIRFRASLTCGIVELKEEIAKRLKLEVGTFDIKYLDDDHEWVLIACDADLQECMDVSRSSGSNIIRVLVHDITSNLGSSCESSGE

SEQ ID NO: 1292 - protein, 254 aa, Oryza sativa
MGRGRVELKRIENKINRQVTFSKRRNGLLKKAYELSVLCDAEVALIIFSSRGKLYEFGSAGCFVLAQLGDLFIICLVGGITKTLERYQHCCYNAQDSNNALSETQSWYHEMSKLKAKFEALQRTQRHLLGEDLGPLSVKELQQLEKQLECALSQARQRKTQLMMEQVEELRRKLEVEGSTSNYRAMQQASWAQGAVVENGAAYVQPPPHSAAMDSEPTLQIGYPHQFVPAEANTIQRSTAPAGAENNFMLGWVL

SEQ ID NO: 1293 - protein, 536 aa, Dubautia ciliolata subsp. glutinosa
MKRSRERKKEAKTTSSVPDSGGMDELLEVLGYKVKSTDMADVAQKLEQLEMVMGEDGVLQLSDTVHYNPSDLSGWVQSMLSVLNDNTPPSDHMVLSGDSSTTMIDFSNSSKIVVHGKQGSKMHEDDPYDLRAIAGGAIYGGESESSVRGNGNGHKRMKSTAVGSVDVQPESPRPVVLVDSQEAGIRLVHTLMACAEAIQHNDLKLADALVKHVGILVASQAGAMAKVATYFAGALAQRIYNIYPQNALETSCYEILQMHFYETCPYLKFAHFTANQAILEAFAGATRVHVIDFSLKQGMQWPALMQALALRSGGPPAFRLTGIGPPQPDNSDALQQVGWKLAQLADTIGVEFEFRGFVANSIADIDANMLNIRASETEVVAVNSVFEVHRLLARPGAVEKVLSGITKMKPKIVTLVEQESNHNGAVFMERFNEALHYYSTMFDSLESSALTLPNSQDDLVMSEVYLGRQICNVVACEGADRVERHETLTQWRVRMNSAGFEPVHLGSNAFKQASMLLALFAGGDGYRVEENDGCLM

SEQ ID NO: 1294 - protein, 536 aa, Dubautia ciliolata subsp. glutinosa
MKRSRERKKEAKTTSSVPDSGGMDELLEVLGYKVKSTDMADVAQKLEQLEMVMGEDGVLQLSDTVHYNPSDLSGWVQSMLSVLNDNTPPSDHMVLSGDSSTTMIDFSNSSEIVVHGKQGSKMHEDDPYDLRAIAGGAIYGGESESSVRGNGNGHKRMKSTAVGSVDVQPESPRPVVLVDSQEAGIRLVHTLMACAEAIQHNDLKLADALVKLVGILVASQAGAMAKVATYFAGALAQRIYNIYPQNALETSCYEILQMHFYETCPYLKFAHFTANQAILEAFAGATRVHVIDFSLKQGMQWPALMQALALRSGGPPAFRLTGIGPPQPDNSDALQQVGWKLAQLADTIGVEFEFRGFVANSIADIDANMLNIRASETEVVAVNSVFEVHRLLARPGAVEKVLSGITKMKPKIVTLVEQESNHNGAVFMERFNEALHYYSTMFDSLESSALTLPNSQDDLVMSEVYLGRQICNVVACEGADRVERHETLTQWRVRMNSAGFEPVHLGSNAFKQASMLLALFAGGDGYRVEENDGCLM

SEQ ID NO: 1295 - protein, 237 aa, Arabidopsis thaliana
MGVQGLTIYHVKSHLQKYRLAKYLPDSSSEGKKTDKKESGDMLSGLDGSSGMQITEALKLQMEVQKRLHEQLEVQRQLQLRIEAQGKYLKKIIEEQQRLSGVLGEPSAPVTGDSDPATPAPTSESPLQDKSGKDCGPDKSLSVDESLSSYREPLTPDSGCNIGSPDESTGEERLSKKPRLVRGAAGYTPDIVVGHPILESGLNTSYHQSDHVLAFDQPSTSLLGAEEQLDKVSGDNL

SEQ ID NO: 1296 - protein, 536 aa, Dubautia menziesii
MKRSRERKKEAKTTSSVPDSGGMDELLEVLGYKVKSTDMADVAQKLEQLEMVMGEDGVLQLSDTVHYNPSDLSGWVQSMLSVLNDNTPPSDHIVLSGDSSTTMIDFSNSSEIVVHGKQGSKMHEDDPYDLRAIAGGAIYGGESESSVRGNGNGIKRMKSTAVGSVDVQPESPRPVVLVDSQEAGIRLVHTLMACAEAIQHNDLKLADALVKLVGILVASQAGAMAKVATYFAGALAQRIYNIYPQNALETSCYEILQMHFYETCPYLKFAHFTANQAILEAFAGATRVHVIDFSLKQGMQWPALMQALALRSGGPPAFRLTGIGPPQPDNSDALQQVGWKLAQLADTIGVEFEFRGFVANSIADIDANMLDIRASETEVVAVNSVFEVHRLLARPGAVEKVLSGITKMKPKIVTLVEQESNHNGAVFMERFNEALHYYSTMFDSLESSALTLPNSQDDLVMSEVYLGRQICNVVACEGADRVERHETLTQWRVRMNSAGFEPVHLGSNAFKQASMLLALFAGGDGYRVEENDGCLM

SEQ ID NO: 1297 - protein, 121 aa, Glycine max
  misc_feature (95)..(95): Xaa can be any naturally occurring amino acid
  misc_feature (98)..(98): Xaa can be any naturally occurring amino acid
MVQSRKFRGVRQRNWGSWVSEIRHPLLKRRVWLGTFETADEAARAYDEAAILMSGRNAKTNFPVGENQMGNHSSSTSSSSTTTLSAVLSAKLRKXCKXPSPSLTCLRLDTENSHIGVWQKR

SEQ ID NO: 1298 - protein, 298 aa, Zea mays
SKQMAKYYWGMLGAATTTTRAGTGSSLIRSTWPPPAAHGGGRSGEPSWEELAFAQDAAGQLGGCVWPPRSYTCTFCRREFRSAQALGGHMNVHRRDRARLRQCAPPDHDQEPIAAPLPAPELADHQQQLLQLHGSPMTKAAVLFSGRPAAACCTHQQTYCNNNREGEGEDSPARYISTTTTIIKDSKSKVLISIPAATTATGSKKAATTIAIIGEEEEEEEEEEEIMVTGRRTKRRRLVHQPFYDLRRLPPASSSPNKGGVEDDDAKVPKLSSPSSLSHHLAGRQEEVDLELRLGTSC

SEQ ID NO: 1299 - protein, 272 aa, Glycine max
MDDGELDFSNHEVFSSPNMGELPSSGSMDSFFDELLKDTHACTHTHTCNPPGPDFSHTHTCYHVHTKIVPAPEEDHVATDDTAESAEKKSSSSKKRSLGNKEAVRKYREKKKARAASLEDEVVKLRALNQHLMKKLKGQAALEAEIARLKCLLVDIRGRIEGEIGSFPYQKPTPNANPPVANLPGSYVMNPCNLQCDDRLECHHPYGKIGESAALNGEEFDGCEFENLQCLASQNLGLKDLRACGVGHTGSNVNSSALSKKRKGGSRAATAG

SEQ ID NO: 1300 - protein, 841 aa, Arabidopsis thaliana
MELDDLDLSGSWPLDQITFASNFKSPVIFSSSEQPFSPLWSFSETSGDVGGELYSAAVAPTRFTDYSVLLASSESETTTKENNQVPSPSWGIMPLENPDSYCAIKAKMTQALRYFKESTGQQHVLAQVWAPVKNRGRYVLTTSGQPFVLGPNSNGLNQYRMVSLTYMFSLDGERDGELGLPGRVFRKKLPEWTPNVQYYSSKEFSRLGHALHYNVQGTLALPVFEPSRQLCVGVVELIMTSPKINYAPEVEKVCKALEAVNLKTSEILNHETTQICNEGRQNALAEILEILTVVCETYKLPLAQTWVPCRYRSVLAFGGGFKKSCSSFDGSCMGKVCMSTSDLAVYVVDAHVWGFRDACAEHHLQKGQGVAGRAFQSGNLCFCRDVTRFCKTDYPLVHYARMFKLTSCFAVCLKSTYTGDDEYVLEFFLPPAITDKSEQDCLLGSLLQTMKQHYSSLKVVSETELCENNMSLEVVEASEDGMVYSKLEPIRIHHPAQISKDYLELNAPEQKVSLNSDFMENNEVDDGVERFQTLDPIPEAKTVKKSERKRGKTEKTISLEVLQQYFAGSLKDAAKSLGVCPTTMKRICRQHGISRWPSRKINKVNRSLTRLKHVIDSVQGADGSLNLTSLSPRPWPHQIPPIDIQLAKNCPPTSTSPLSNLQDVKIENRDAEDSAGSSTSRASCKVNPICETRFRLPTHNQEPSRQVALDDSDSSSKNMTNFWAHLTCQDTASPTILQHKLVSIKATYREDIIRFKISPESVSITELKQQVAKRLKLETAAFELKYLDDDREWVSVSCDADLSECLDTSAAKANTLRLSVHDVTFNFGSSCESSEETMMCL

SEQ ID NO: 1301 - protein, 233 aa, Eschscholzia californica subsp. californica
GTRVGAPPEVVAKLEEANATGEAMARTGSGTGCIGEDPALDQFMEAYCEMLTKYQQELTKPFEEAMMFLSRIECQFKALTVSDSVGGEAVNRNGSSDEDIDANDNYIDPQAEDRELKGQLLRKYSGYLGSLKQEFLKKRKKGKLPKEARQQLLDWWSRHYKWPYPSESQKIALAESTGLDQKQINNWFINQRKRHWKPSEEMQFVVMDSAHQHYYIENGMGNSRFPMDCTPML

SEQ ID NO: 1302 - protein, 136 aa, Rosa hybrid cultivar
MMEVCRAQGFVYGIIPEKGKPVSGASDNLREWWKDKVRFDRNGPAAISKYQADNSIPGLMEDCISVASTPHTLQELQDTTLGSLLSALMQHCDPPQRRFPLEKGVSPPWWPTGNEEWWPQLNLANQGPPPYKKPHG

SEQ ID NO: 1303 - protein, 184 aa, Lilium hybrid division I
MDRKVGTNEDVEVRKGPWTMEEDLILINYIANHGDGVWNTLARSAGLKRTGKSCRLRWLNYLRPDVRRGNITPEEQLLIMELHDRWGNRWSKIAKELPGRTDNEIKNFWRTRVQKKSKNGESSEGQISMLSDETSAMQMEDVDVGVSQTSYDQGQTSNNLDAFEIPFEPGDNLLSVEELWAMQY

SEQ ID NO: 1304 - protein, 208 aa, Glycine max
MEAETSNGGGIGGLYVKVMTDDQMELLRQQISVYATICEQLVEMHKAVTTQQDLAGLRLGNLYCDPLMACSGHKITARQRWTPTPLQLQILERIFDEGNGTPSKQKIKDITIELGQHGQISETNVYNWFQNRRARSKRKQLTPAPNVVEPEVESPKEKKTRAEGFQVQPYENSSPHRIKDMYIQSPDIGFDQLLGKIEVASCYSSYFL

SEQ ID NO: 1305 - protein, 234 aa, Zea mays
  misc_feature (140)..(140): Xaa can be any naturally occurring amino acid
MARGKVQLRRVENPVHRQVTFCKRRAGLLKKARELSVLCDASVGIIVFSAHGKLYDLATTGTMEELIERYKAASAGEATTDGCGRHNRMDPKHETTVLQQEINLLQKGLSIVLGRYIHGNRANEHMNVDELNALERYLEXIWMYNTRSAKMQIMAQEIQALKSKEGMVKAANEILQEKIVEHSSLLDVGMVVADQQNGRFSTVPLVEEVISSNPLTILSGYSSCRGSEMGYSFC

SEQ ID NO: 1306 - protein, 247 aa, Gerbera hybrid cultivar
MGRGRVELKRIENKINRQVTFAKRRNGLLKKAYELSVLCDAEVALIIFSNRGKLFEFCSTSNMLKMLERYQNCTYGSMEVDRSTPNAEQSSYKEYMKLKAKYESLQQYQRQLFGEDLGPLSLKELEQLERQLDSTLRQIRSIRTQSMLDRLSELQVKERMWVEANKALQNKLEEVYAENQAGPSWAAGEHHSSYGQEHQHQHQSQGFFQPLDCNSNLQIGYNTVDSSHITASTNGQNLNGLIPGWML

SEQ ID NO: 1307 - protein, 603 aa, Arabidopsis thaliana
  misc_feature (574)..(574): Xaa can be any naturally occurring amino acid
  misc_feature (585)..(585): Xaa can be any naturally occurring amino acid
MTVEQNLEALDQFPVGMRVLAVDDDQTCLKILESLLRHCQYHVTTTNQAQKALELLRENKNKFDLVISDVDMPDMDGFKLLELVGLEMDLPVIMLSAHSDPKYVMKGVTHGACDYLLKPVRIEELKNIWQHVVRSRFDKNRGSNNNGDKRDGSGNEGVGNSDPNNGKGNRKRKDQYNEDEDEDRDDNDDSCAQKKQRVVWTVELHKKFVAAVNQLGYEKAMPKKILDLMNVEKLTRENVASHLQKFRLYLKRISGVANQQAIMANSELHFMQMNGLDGFHHRPIPVGSGQYHGGAPAMRSFPPNGILGRLNSSSGIGVRSLSSPPAGMFLQNQTDIGKFHHVSSLPLNHSDGGNILQGLPMPLEFDQLQTNNNKSRNMNSNKSIAGTSMAFPSFSTQQNSLISAPNNNVVVLEGHPQATPPGFPGHQINKRLEHWSNAVSSSTHPPPPAHNSNSINHQFDVSPLPHSRPDPLEWNNVSSSYSIPFCDSANTLSSPALDTTNPRAFCRNTDFDSNTNVQPGVFYGPSTDAMALLSSSNPKEGFVVGQQKLQSGGFMVADAGSLDDIVNSTMKQEXQSQGDLSGGDXWDMEGLVHSEHAYERTNI

SEQ ID NO: 1308 - protein, 430 aa, Zea mays
  misc_feature (92)..(92): Xaa can be any naturally occurring amino acid
  misc_feature (101)..(101): Xaa can be any naturally occurring amino acid
MGRHSCCYKQKLRKGLWSPEEDEKLMNHITKHGHGCWSSIPKLAGLQRCGKSCRLRWINYLRPDLKRGAFSQDEEDLIIELHAVLGNRWSQXAAQLPGRTXYEIKNLWNSCIKKELRQKGIDPNTHKPLTEADRSGAAPTISTERTSGSSEINPSSAGALGNLSHLLSETAQSSMLMPVYDKNRAETPNLARPKVPPKELFLEQLTAGHESPSTCRSSGQTLYFPFQQPLGYNSESGSGDGANMNSLWFNQSDFNCSTISTVMPPASPSALSTSMGLNLPPDNSRHGGTGIGSTAVDSFYWDGTNPSSSSSTGSRGSNSMGFEPQSTSSILENSVFQWTDIGQEKDTRAHLVEELKWPDLLHGTFAETTTAMQNQSQTLYDDVIKAESQFSMEGICASWFQNQQPQQQLQATPDMYDKDLQRMQLSFENI

SEQ ID NO: 1309 - protein, 247 aa, Gerbera hybrid cultivar
MGRGRVELKRIENKINRQVTFSKRRNGLLKKAYELSVLCDAEVGLIIFSSRDKLYEFGSVGVMKTLERYQRCCFNPQDNNNERETQSWYQEVSKLKAKFESLQRTQRHLLGEDLGPLSVKELHNLEKQLEGALTQARQRKTQIMVEQMEELRRKERELGDMNKHLKIKVSHELSTFDAEGQGYRAQLPCPWNSGTNNTFTMHPSQSNPMDCQQEPILQIGYNQFMHGEGSSVQRNMVGENGIHGWVL

SEQ ID NO: 1310 - protein, 538 aa, Dubautia raillardioides
MKRSRERKKEAKITSSVPDSGGMDELLEVLGYKVKSTDMADVAQKLEQLEMVMGEDGVLQLSDTVHYNPSDLSGWVQSMLSVLNDYNNTPPSDHIVLSGDSSTTMIDFSNSSEIVVHGKQGSKMHEDDPYDLRAIAGGAIYGGESESSVRGNGNGIKRMKSTAVGSVDVQPESPRPVVLVDSQEAGIRLVHTLMACAEAIQHNDLKLADALVKHVVILVASQAGAMAKVSTYFAGALAQRIYNIYPQNALETSCYEILQMHFYETCPYLKFAHFTANQAILEAFAGATRVHVIDFSLKQGMQWPALMQALALRYDGPPAFRLTGIGPPQPDNSDALQQVGWKLAQLADTIGVEFEFRGFVANSIADIDADMLDIRASETEVVTVNSVFEVHRLLARPGAVEKVLSGITKMKPKIVTLVEQESNHNGAVFMERFNEALHYYSTMFDSLESSALTLPNSQDDLVMSEVYLGRQICNVVACEGADRVERHETLTQWRVRMNSAGFEPVHLGSNAFKQASMLLALFAGGDGYRVEENDGCLM

SEQ ID NO: 1311 - protein, 538 aa, Wilkesia gymnoxiphium
MKRSRERKKEAKTTSSVPDSGGMDELLEVLGYKVKSTDMADVAQKLEQLEMVMGEDGVLQLSDTVHYNPSDLSGWVQSMLSVLNDNNNTPPSDHIVLSGDSSTTMIDFSNSSEIVVHGKQGSKMHEDDPYDLRAIAGGAIYGGESESLVRGNGNGIKRMKSTAVGSVDVQPESPRPVVLVDSQEAGIRLVHTLMACAEAIQHNDLKLADALVKHVGILVASQAGAMAKVATYFAGALAQRIYNIYPQNALETSCYEILQMHFYETCPYLKFAHFTANQAILEAFAGATRVHVIDFSLKQGMQWPALMQALALRSGGPPAFRLTGIGPPQPDNTDALQQVGWKLAQLADTISVEFEFRGFVANSIADIDANMLDIRPSETEVVAVNSVFEVHRFLARPGDVEKVLSGITKMKPKIVTLVEQESNHNGAVFMERFNEALHYYSTMFDSLESSALTLPNSQDDLVMSEVYLGRQICNVVACEGADRVERHETLTQWRVRMNSAGFEPVHLGSNAFKQASMLLALFAGGDGYRVEENDGCLM

SEQ ID NO: 1312 - protein, 97 aa, Brassica napus
RSGLTVLRNMAARWHEHLQCWCLNFHGRVTVASVKNFQLVATVDQSQPSGKGDEETVLLQFGKGGDDTFTMDYRQPLSAFQAFAICLASSGTKLACE

SEQ ID NO: 1313 - protein, 538 aa, Argyroxiphium kauense
MKRSRERKKEAKTTSSVPDSGGMDELLEVLGYKVKSTDMADVAQKLEQLEMVMGEDGVLQLSDTVHYNPSDLSGWVQSMLSVLNDNNNTPPSDHIVLSGDSSTTMIDFSNSSEIVVHGKQGSKMHEDDPYDLRAIAGGAIYGGESESSVRGNGNGIKRVKSTAVGSVDVQPESPRPVVLVDSQEAGIRLVHTLMACAEAVQHNDLKLADALVKHVGILVALQAGAMAKVATYFAGALAQRIYNIYPQNALETSCYEILQMHFYETCPYLKFAHFTANQAILEAFAGATRVHVIDFSLKQGMQWPALMQALALRSGGPPAFRLTGIGPPQPDNSDALQQVGWKLAQLADTIGVEFEFRGFVANSIADIDANILDIRAPETEVVAVNSVFEVHRLLARPGAVEKVLSGITKMKPKIVTLVEQESNHNSAVFMERFNEALHYYSTMFDSLESSALTLPNSQDDLVMSEVYLGRQICNVVACEGADRVERHETLTQWRVRMNSAGFEPVHLGSNAFKQASMLLALFAGGDGYRVEENDGCLM

SEQ ID NO: 1314 - protein, 538 aa, Argyroxiphium sandwicense subsp. macrocephalum
MKRSRERKKEAKTTSSVPDSGGMDELLEVLGYKVKSTDMADVAQKLEQLEMVMGEDGVLQLSDTVHYNPSDLSGWVQSMLSVLNDNNNTPPSDHIVLSGDSSTTMIDFSNSSEIVVHGKQGSKMHEDDPYDLRAIAGGAIYGGESESSVRGNGNGIKRMKSTAVGSVDVQPESPRPVVLVDSQEAGIRLVHTLMACAEAIQHNDLKLADALVKHVGILVASQAGAMAKVATYFAGALAQRIYNIYPQNALETSCYEILQMHFYETCPYLKFAHFTANQAILEAFAGATRVHVIDFSLKQGMQWPALMQALALRSGGPPAFRLTGIGPPQPDNSDALQQVGWKLAQLADTIGVEFEFRGFVANSIADIDANMLDIRPSETEVVAVNSVFEVHRLLARPGAVEKVLSGITKMKPKIVTLVEQESNHNGAVFMERFNEALHYYSTMFDSLESSALTLPNSQDDLVMSEVYLGRQICNVVACEGADRVERHETLTQWRVRMNSAGFEPVHLGSNAFKQASMLLALFAGGDGYRVEENDGCLM

SEQ ID NO: 1315 - protein, 85 aa, Oryza sativa
MSGSRSSSPNSKSEWSRKENKMFEEALAYYGEDTPNRWDKVASAMGGIKSAEEIRCHYEDLTDDVKTIESGRVQFPKYKTQGYWT

SEQ ID NO: 1316 - protein, 148 aa, Pueraria montana var. lobata
KDRHSKMMTSKGLRDRRVRLSVNTAIQFYDLQDRLGYDQPSKAVEWLIKAASEAISELPSLNNPFPDTPKQPSDEKRPTSGQRGGQPQQGFDDADGDTSYHQNQSQNLSLSKSACSSTSETSKGSGLSLSRSEIRVNRVKARARARER

SEQ ID NO: 1317 - protein, 88 aa, Hordeum vulgare subsp. vulgare
VLKQSDVGTLGRIVLPKKEAETHLPELKTGDGISIPIEDIGTSQVWSMRYRFWPNNKSRMYLLENTGDFVRSNELQEGDFIVLYSDVK

SEQ ID NO: 1318 - protein, 139 aa, Wisteria floribunda
KDRHSKIHTSQGLRDRRVRLSIDIARKFFDLQDMLGFDKASNTLEWLFSKSNKAIEELTRIKHCSSDVDDDHVHGFSSSSSEGEVVSKDIIDTIPDLQQQQMVDSKERNLKRAQKELPACVWAKMKESREKARARARER

SEQ ID NO: 1319 - protein, 244 aa, Gentiana triflora
MGRGKVELKRIENKINRQVTFAKRRNGLLKKAYELSVLCDAEVALIIFSNRGKLYEFCSGSSTTETVERYQRYTYGLQDAGHPSDDPQNSYQEYVKLKARVEVLQGYHRNFLGEDLGSLSCKELEHLEHQVETSLKQVRSTKTSFMLDQVADLQRKEEMLAEENKALRGKLDERANQVPLRLSWEGRQQAPTGYNNVPAHTQGFFQPLGLNSTLQMGYNQGGAEGNYNVHAGNNINGFMPGFMN

SEQ ID NO: 1320 - protein, 368 aa, Hordeum vulgare subsp. vulgare
MNCNFNSDLLEKEAGRTSFPWARPCDGCHAAPSAVYCCADAAYLCSSCDTQVHSANRVASRHERVRVCETCESTPAVLACHADAAALCTACDAQVHSANPIAQRHQRVPVLPLPAVAIPAASGFAEAEASVTAHGDKEGGEEVDSWLLRRNSDDNNCANKIDRYFNLVGYNMYYDNITCDPRPQEQYRMQEQQHVQNRYREKEGCECVVPPQVVMASEQQGSNYGTIGAGQAASVTAMASTYTASISNDISFSSMEVGIVPDNTRPNISNRNILTSSEAIELSGHSLQMPVHFSSMDREARVLRYKEKKQARKFQKTIRYATRKAYAEARPRIKGRFAKRSDIEHEENHMLSPPALPDTSSYNTVPWF

SEQ ID NO: 1321 - protein, 210 aa, Brassica juncea
MLCSEYESPVTLGGEYCPKLASSCPKKPAGRKKFRETRHPVYRGVRLRKSGKWVCEVREPNKKSRIWLGTFLTAEIAARAHDVAAIALRGKSACLNFADSAWRLRIPETTCPKEIQKAAAEAAVAFQAELNDTTADHGLDVEETIVEAIFTEESSEGFYMDEEFMFGMPTLWASMAEGMLLPPRPYNSDLTMTSTEMLTCPFGVMSTCNH

SEQ ID NO: 1322 - protein, 448 aa, Zea mays
MPFRSIVRDVRDGFGSLSRRGFEVRFLSHRRGKSHGAVHELHDPVLVVQSSCWASLPPELLRDVIERLETSEDTWPSRKHVVACAAVCRTWREMCREIVKSPEFSGKITFPVSLKQPGPRDGTIQCFIKRDKSTQIYSLYLSFSSAVPVENGKFLLSAKRNCRATYTEYIISINSGDTSRCTSNNTYIGKLRSNFLGTKFVIYDTHPPYNGTSQTVAGKTSQRFYSKKGSTKVSCRWYSIAQISYELNVLGTRGPRRMNCVMHSIPASCLEAGGSVPCQPDSIAAHSVGGSFSSVSLSKSSTMDHSMHFTSSRLSDAITGDGIVNRGQALNDADDEECKDMPLILRNKAPRWHEQLQCWCLNFRGRVTVASVKNFQLVAATQPAAGALTPSQAAPQPAPPPPPDQEKVILQFGKVGKDIFTMDYCYPLSAFQAFAICLSSFDTKLACE

SEQ ID NO: 1323 - protein, 511 aa, Solibacter usitatus Ellin6076
MRPPVHAILYDQDTRHGVGPGDCAIRGQRSRGANFGGEREGQGRNIPDRIVERAMAHLLIVDDDANTLASLARAFRLAGHEATVCDNASRALELVKGQGFDMMLSDVVMPGKDGLTLLEEVRGLGITLPVVMISGQANIEMAVRATRLGAIDFLEKPLSTDKLLLTVDNVLKLKRLEDENRELRQRVGKHEIVHSGERMQRVMAQVDRVAASEARVCILGETGTGKELIARALHERSSRKGGPFVTLNCAAVPAELIESELFGHEKGSFTGAASRHIGKFEQANHGTLFLDEIGDMPILMQAKLLRVLEERQVERVGGDRTIPVDVRVIVATHRNLHELVKKGVFREDLYHRVYVFPLFLPPLRERDGEIAVLVAHFAAQVSEVNGWRPKVFLPEAIQELQRYSWPGNVRELRNVVERLLLLADGAIDAALVRLALPTGESEAGGQTGERGHLGTLAERTDCFEREQILSELKRNNQRMTDTAKALGLERSHLYKKCQALGIDLRAMRKAQ

SEQ ID NO: 1324 - protein, 537 aa, Argyroxiphium sandwicense subsp. macrocephalum
MKRSRERKKEAKTTSSVPDSGGMDELLEVLGYKVKSTDMADVAQKLEQLEMVMGEDGVLQLSDTVHYNPSDLSGWVQSMLSVLNDNNTPPSDHIVLSGDSSTTMIDFSNSSEIVVHGKQGSKMHEDDPYDLRAIAGGAIYGGESESSVRGNGNGIKRMKSTAVGSVDVQPESPRPVVLVDSQEAGIRLVHTLMACAEAIQHNDLKLADALVKHVGILVASQAGAMAKVATYFAGALAQRIYNIYPQNALETSCYEILQMHFYETCPYLKFAHFTANQAILEAFAGATRVHVIDFSLKQGMQWPALMQALALRSGGPPAFRLTGIGPPQPDNSDALQQVGWKLAQLADTIGVEFEFRGFVANSIADIDANMLDIRPSETEVVAVNSVFEVHRLLARPGAVEKVLSGITKMKPKIVTLVEQESNHNGAVFMERFNEALHYYSTMFDSLESSALTLPNSQDDLVMSEVYLGRQICNVVACEGADRVERHETLTQWRVRMNSAGFEPVHLGSNAFKQASMLLALFAGGDGYRVEENDGCLM

SEQ ID NO: 1325 - protein, 535 aa, Madia sativa
ERKKEAKTTSSVPDSGGMDELLEVLGYKVKSTDMADVAQKLEQLEMVMGEDGVLQLSDTVHYNPSDLSGWVQSMLLVLNEDNNNTLDDDVSDHILLPGNSSTTMIDFSSSRTETVNRKHGSKMLEDDPYDLRAIAGGAIYRPESEGIGNGMKRMKTTAAGSEVVDVQPESPRPVVLVDSQEAGIRLVHTLMACAEAIQHNDLKLADALVKHVGILVASQAGAMAKVATYFAGALAQRIYNIYPQNALETSCNENLQMHFYETCPYLKFAHFTANQAILEAFAGATRVHVIDFSLNQGMQWPALMQALALRSGGPPAFRLTGIGPPQPDNSDALQQVGWKLAQLADTIGVEFEFRGFVANSIADIDANMLDIRASETEVVAVNSVFEVHRLLARPGSVEKVLSSITGMKPKIVTLVEQESNHNGAVFMERFNEALHYYSTMFDSLESSALTLPNSQDDLVMSEVYLGRQICNVVACEGTDRVERHETLTQWRVRMNSAGFEPVHLGSNAFKQASMLLALFSGGDGYRVEENDGCLM

SEQ ID NO: 1326 - protein, 163 aa, Arabidopsis thaliana
MANESNNLGLEITELRLGLPGDIVVSGESISGKKRASPEVEIDLKCEPAKKSQVVGWPPVCSYRRKNSLERTKSSYVKVSVDGAAFLRKIDLEMYKCYQDLASALQILFGCYINFDDTLKESECVPIYEDKDGDWMLAGDVPWEMFLGSCKRLRIMKRSCNRG

SEQ ID NO: 1327 - protein, 118 aa, Candida glabrata CBS 138
MGNTTEDDIDKQIELREQDRWLPINNVARLMKNTLPETAKVSKSAKECMQECVSEFISFVTSEASDRCAQDRRKTINGEDILISLHALGFENYAEVLKIYLAKYRQQQALKNNYEEDS

SEQ ID NO: 1328 - protein, 548 aa, Carlquistia muirii
MKRSREHKKEAKSTSSVPDSGGMDELLEVLGYKVKSTDMADVAQKLEQLEMVMGEDGVLQLSDTVHYNPSDLSGWVQSMLLVLNDDNNNNNTADDSDHIFLPGNSLTTMIDFSNSTETVVHGKQRSKLHEDDPYDLRAIAGGAIYRSESESSMRGNGNPNGNGMKRMKTTAAGSEVVDVQPESPRPVVLVDSQEAGIRLVHTLMACAEAIQHNDLKLADALVKHVGILVASQAGAMAKVATYFAGALAQRIYNIYPQNAIETSCYEILQMHFYETCPYLKFAHFTANQAILEAFAGATRVHVIDFSLNQGMQWPALMQALALRSGGPPAFRLTGIGPPQPDNSDVLQQVGWKLAQLADTIGVEFEFRGFVANSIADIDVSMLDIRAPDTEVVAVNSVFEVHRLLARPGAVEKVLSSITGMKPKIVTLVEQESNHNGAVFMERFNEALHYYSTMFDSLESSALTLPNNQDDLVMSEVYLGRQICNVVACEGTERVERHETLTQWRVRMNSAGFEPVHLGSNAFKQASMLLALFAGGDGYKVEENDGCLM

SEQ ID NO: 1329 - protein, 197 aa, Arabidopsis thaliana
  misc_feature (165)..(165): Xaa can be any naturally occurring amino acid
MEKEGLGLEITELRLGLPGRDVAEKMMKKRAFTEMNMTSSGSNSDQCESGVVSSGGDAEKVNDSPAAKSQVVGWPPVCSYRKKNSCKEASTTKVGLGYVKVSMDGVPYLRKMDLGSSQGYDDLAFSLDKLFGFRGIGVALKDGDNCEYVTIYEDKDGDWMLAGDXPWGMFLESCKRLRIMKRSDATGFGLQPRGVDE

SEQ ID NO: 1330 - protein, 548 aa, Carlquistia muirii
MKRSRERKKEAKTTSSVPDSGGMDELLEVLGYKVKSTDMADVAQKLEQLEMVMGEDGVLQLSDTVHYNPSDLSGWVQSMLLVLNDDNNNNNTADDSDHIFLPGNSLTTMIDFSNSTETVVHGKQRSKLHEDDPYDLRAIAGGAIYRSESESSIRGNGNPNGNGMKRMKTTAAGSEVVDVQPESPRPVVLVDSQEAGIRLVHTLMACAEAIQHNDLKLADALVKHVGILVASQAGAMAKVATYFAGALAQRIYNIYPQNAIETSCYEILQMHFYETCPYLKFAHFTANQAILEAFAGATRVHVIDFSLNQGMQWPALMQALALRSGGPPAFRLTGIGPPQPDNSDVLQQVGWKLAQLADTIGVEFEFRGFVANSIADIDVSMLDIRAPDTEVVAVNSVFEVHRLLARPGAVEKVLSSITGMKPKIVTLVEQESNHNGAVFMERFNEALHYYSTMFDSLESSALTLPNNQDDLVMSEVYLGRQICNVVACEGTERVERHETLTQWRVRMNLAGFEPVHLGSNAFKQASMLLALFAGGDGYKVEENDGCLM

SEQ ID NO: 1331 - protein, 132 aa, Wisteria floribunda
KDRHSKINTARGLRDRRMRLSLEVAKRFFGLQDMLGFDKASKTVECLLTQAKVEIKQLAREKNISIHPSCSSVGAKSASSTSECEGVSGLDEVVVSGNQEHAVVKRRLTKVSRKSAFSPVGREKARARARER

SEQ ID NO: 1332 - protein, 137 aa, Calycadenia multiglandulosa
MKRPRERKKEAKASTSSSSSMAPAAKAKDLQNPPDSGGMDELLEVLGYKVKSTDMDDVAQKLEQLEMVMGEDGILQLSDTVHYNPSDLSGWVQSMLSELNNSGGDSDIGIGIPAGGESSTTMIDFSNNKEKQPEDPY

SEQ ID NO: 1333 - protein, 226 aa, Thalictrum dioicum
MGRGKIEIKRIENTTNRQVTFCKRRNGLLKKAYELSVLCEAEVALIVFSSRGRLYEYSNNSVKKTIERYKKASTDSPNSGSVSEANVQFYQQEASKLHNQIASLQNHNRNLLGESLSNLNIKELRQIEKKIEGGISKIRAKKNELLFAEVEYMQKREIDLQTDNKYLRAMIAANERAPPEHMNLMPANEYHIMSSAPFDSRNFLPANLLDHNNNYSRSDQTTLQLG

SEQ ID NO: 1334 - protein, 360 aa, Zea mays
MVVKEFGREVVMSMDKVKRGGEALTAAGAGDEEKDDAVLPGFRFHPTDEELVTFYLRRKVARKPLSMEIIKEMDIYKHDPWDLPKASTAAGGEKEWYFFCLRGRKYRNSIRPNRVTGSGFWKATGIDRHIYPATANPVESVSVGLKKSLVYYRGSAGKGTKTDWMMHEFRLPPAAAASPTPTSMQEAEVWTICRIFKRNIAYKRQPQLPAWRQQQSSSNTGSFESDGGGGGDEYMNRCLPVPATATAHQIGGMLNGGGVVSATRSSSSSFFRDRESVHGGQQFHFHEQWLSRFPAAPAVEQKPQLLDPSAMAIAFHQNDDQSVATAAAASECCKDGYYWDEIARFMEVNDPTVLHDCRYA

SEQ ID NO: 1335 - protein, 250 aa, Zea mays
MGRGRVELKRIENKINRQVTFSKRRNGLLKKAYELSVLCDAEVALIIFSSRGKLYEFGSAGITKTLERYQHCCYNAQDSNGALSETQSWYQEMSKLRAKFEALQRTQRHLLGEELGPLSVKELQQLEKQLECALSQTQLMMEQVEELRRKERHLGEMNRQLKHKLEAEGCSNYRTLQHAAWPAPGSTMVEHDGATYHVHPTTAQSVAMDCEPTLQIGYPPHHQFLPSEAANNIPRSPPGGENNFMLGWVL

SEQ ID NO: 1336 - protein, 439 aa, Arabidopsis thaliana
MEENMSNLTSASGDQASVSSGNRTETSGSNINQHHQEQCFVPQSSLKRKRNQPGNPDPEAEVMALSPKTLMATNRFICEVCNKGFQRDQNLQLHKRGHNLPWKLKQRSNKDVVRKKVYVCPEPGCVHHHPSRALGDLTGIKKHFFRKHGEKKWKCEKCSKKYAVQSDWKAHAKTCGTKEYKCDCGTLFSRRDSFITHRAFCDALAEESARAMPNPIMIQASNSPHHHHHQTQQNIGFSSSSQNIISNSNLHGPMKQEESQHHYQNIPPWLISSNPNPNGNNGNLFPPVASSVNTGRSSFPHPSPAMSATALLQKAAQMGSTKSTTPEEEERSSRSSYNNLITTTMAAMMTSPPEPGFGFQDYYMMNHQHHGGGEAFNGGFVPGEEKNDVVDDGGGETRDFLGLRSLMSHNEILSFANNLGNCLNTSATEQQQQQHSHQD

SEQ ID NO: 1337 - protein, 255 aa, Oryza sativa
MASILSPLGKFWRIELEKDELGMFFKGGWLQFLSFHGISPGDVVLLRHEGNLVFKIKVFGINGCKKDLKTKDDITIQQSARNQHETPSFSTRKCNKNSRFGEDCKNQLQEIPCSIKGSRKKGRETKRPKKSKSIYEIGPPSWIKKEISNYMLENGNISLPGIFCKSIGLVEETTITLMINSSRGRSSSSSSRSWEVACSVNKNGYGCCNLLPSGWKRFCQANGLLVGDVCTFSVVEATLWHVAIDRVERSRLHRR

SEQ ID NO: 1338 - protein, 1129 aa, Oryza sativa
MDDGDLDFSNPDTFLCPAVGGADPDGSCSMDSYFDDILKDTEHHACTHTHTCNPPVHDLSHTHTCVHVHTKIVSAPSDTPSDAAETAESPTENNASKKRPSGNRAAVRKYREKKKAHTASLEEEVVHLRALNQQLMKKLQNHATLEAEVSRLRCLLVDIRGRIEGEIGAFPYQRPVKNIDLVSSVDQGSYLGGAQVMNSCDFRCADQMYCSPGMQVRTMGEDGAVSGQVLGQGACDIASIQCQGAKSGSAKLPVCGAMEHGYYGIPKAVRRCQGARTGSQPSEPQVPRIGRQRPPPRSRSTSSSPRRPVKYCHVEDAPPEPSDLPRGAIAPAWTGRTGSPAKKLQVNADDSTDELVDPPKVEEKIGGVPHGLSTDSEVVQREAESISRKTLRSSAEKFEFQAEVSRLMDIIINSLYSNKDIFLRELISNASDALDKIRFLALTDKEVLGEGDTAKLEIQIKLDKEKKILSIRDRGIGMTKEDLIKNLGTIAKSGTSAFVEKMQTGGDLNLIGQFGVGFYSVYLVADYVEVISKHNDDKQHVWESKADGSFAISEDTWNEPLGRGTEIRLHLRDEAKEYVEEDKLKDLVKKYSEFINFPIYLWATKEVDVEVPADEDESSESSEEEESSPESTEEEETEESEEKKPKTKTVKETTTEWELLNDVKAIWLRSPKEVTEEEYTKFYHSLAKDFGDDKPLSWSHFTAEGDVEFKALLFVPPKAPHDLYESYYNSNKSNLKLYVRRVFISDEFDELLPKYLSFLKGLVDSDTLPLNVSREMLQQHSSLKTIKKKLIRKALDMIRKLAEEDPDEYSNKDKTDEEKSAMEEKKGQYAKFWNEFGKSVKLGIIEDATNRNRLAKLLRFESTKSEGKLASLDEYISRMKPGQKDIFYITGSSKEQLEKSPFLERLTKKNYEVIYFTDPVDEYLMQYLMDYEDKKFQNVSKEGLKLGKDSKLKDLKESFKELTDWWKKALDTESVDSVKISNRLSDTPCVVVTSKYGWSANMEKIMQSQTLSDASKQAYMRGKRVLEINPRHPIIKELRDKVAQDSESESLKQTAKLVYQTALMESGFNLPDPKDFASSIYRSVQKSLDLSPDAAVEEEEEVEEAEVEEKESSNIKEEAEPSSYDKDEL

SEQ ID NO: 1339 - protein, 267 aa, Medicago truncatula
MAGSSDDDIHQTHPSLVPPDSQDFSNIFNQLMDPSSSSSFNFSDPYPPNPSTISYPPPHFTSSSSAQNDEGSELPSSKAAPPPRSSSKRSRAAEFHNLSEKRRRSKINEKLKALQNLIPNSNKTDKASMLDEAIEYLKQLQLQVQMLMVRNGYSLHPMSLSGGSRPPTMFPQTELFNLDEGNSGFHNSNNAITPPTNNEYFARQAFSFPEQCSISNQSVILPSSTNIASFDTSSSFQTSIKDNFCNNMPQLILDTTRIGKTPSSDVS

SEQ ID NO: 1340 - protein, 128 aa, Brassica napus
  misc_feature (106)..(106): Xaa can be any naturally occurring amino acid
MADSDNDSGGHKDGGSASSREQDRFLPIANVSRIMKKALPANAKISKDAKETVQECVSEFISFVTGEASDKCQREKRKTINGDDLLWAMTTLGFEDYVEPLKVYLXKYREVEGERTTTGKQVDKEGGA

SEQ ID NO: 1341 - protein, 223 aa, Sorghum bicolor
IENKISRQVTFAKRRNGLLKKAYELSLMCDAEVALIIFSGRGRLFEFSSSSCMYKTLERYRSSNYSSQEVKVPLDSEINYQDYLKLRTRVEFLQTTQRNILGEVLGPLSMKELEQLENQIETSLKQIRSRENQMLLDQLFDLKSKEQELQDLNKDLRKKLQETSPENALHVSSWEEGGHSGASGNVLDPYQGLLQHPESDPSLQIGYHQQAYMDQLNNEDMAG

SEQ ID NO: 1342 - protein, 246 aa, Silene latifolia subsp. alba
MGRGRVQLKMIENKINRQVTFSKRRSGIIKKAHEISVLCDAEVALIIFSHRGKLFDFASDSCMEKILERYERYCYAEKQLASNDPDAQVNWTFDYAKLKAKLDLLQRNHRQYLGQDLDALNLKELQSLEQQLDVGLKHIRSKKNQLMHDSISELQKKERSMEEQNKMLTKKIKEKGKAATTETQQMQWQQQQQNHQDVATSSDYLIHPPVPLNMSNSYEKEQGGEGSRNDLNLTLESNCWAHHSLF

SEQ ID NO: 1343 - protein, 240 aa, Brassica napus
VDPRVRAHAQAQAREHVTKRAKMVEETAKSRDGNCRLFGIPLVNNVNGTDSTMSPRNNFNDTAGLTQMTSPKVQDLSDQSKGSKSTNDHREQGRPFPASQPHPKDVQTKTNSCRSCTKVQKQGIALGRSVDLSKFQNYEELVTELDRLFEFNGELMAPKKDWLIVYTDDENDMMLVGDDPWQEFCCMVRKIFIYTKEEVRKMNPGTLSCRSEEEAVVGEGSDAKDAKSASNPSLSSAGHS

SEQ ID NO: 1344 - protein, 257 aa, Silene latifolia subsp. alba
MGRGRVQLKRIENKINRQVTFSKRRTGLLKKAHEISVLCDADVGLIVFSTKGKLFEYATDSCMEKILERYERYSYAERQLTAPDPDSHVSWTLEHAKLKARLEILQKNHRHYMGEDLDTLSLKELQNFEHQLDTALKHIRSKKNQLMYESIHELQKKDKALQEHNNTLSKKVKEKEKEKEKEKAIADQQAQWVQQNQELNPSAFFSSQVLPALNIRGNYETGSSVIVNEVAQTQNRSNSSNNNSLVPSWMLNHLAEQ

SEQ ID NO: 1345 - protein, 594 aa, Arabidopsis thaliana
MVHSKKFRGVRQRQWGSWVSEIRHPLLKRRVWLGTFDTAETAARAYDQAAVLMNGQSAKTNFPVIKSNGSNSLEINSALRSPKSLSELLNAKLRKNCKDQTPYLTCLRLDNDSSHIGVWQKRAGSKTSPNWVKLVELGDKVNARPGGDIETNKMKVRNEDVQEDDQMAMQMIEELLNWTCPGSGSIAQEISIVVIMILMKACDKGDFDLVSHTSLRSHQNSQTSENTPPSPPQNHRRKRGKNITNMGKGGSLSEGVIKNIIISYTYVAIWIFLSFTVIVYNKYILDKKMYDWPFPISLTMIHMSFCSTLAFLLIKVFKFVEPVSMSRDTYLRSVVPIGALYSLSLWLSNSAYIYLSVSFIQMLKALMPVAVYSIGVLFKKEGFKSETMMNMLSISFGVAIAAYGEARFDVWGVILQLGAVAFEATRLVMIQILLTSKGITLNPITSLYYVAPCCLAFLFIPWIVVEFPILRDTSSFHFDYLIFGTNSFCAFALNLAVFLLVGKTSALTMNVAGVVKDWLLIAFSWSVIKDTVTPINLFGYGIAFLGVAYYNHAKLQALKAKEAQKTAQQVDEETGRLLEEREGNEGGRKNEPED

SEQ ID NO: 1346 - protein, 540 aa, Calycadenia multiglandulosa
ERKKEAKASTSSSSSMAPAAKAKDLQNPPDSGGMDELLEVLGYKVKSTDMDDVAQKLEQLEMVMGEDGILQLSDTVHYNPSDLSGWVQSMLSELNNSGGDSDIGIGIPAGGESSTTMIDFSNNKEKQPEDPYDLRAIAGGAIYGEGSESSGNGIKRMKMKSTAEGSGAVDVPPESPPRPVVLVDSQEAGIRLVHTLMACAEAVQNNDMKLAEALVKHVGILVASQAGAMAKVATYFAGALAQRIYKIYPQDGGLETSCWEILQMHFYESCPYLKFAHFTANQAILEAFAGAARVHVIDFSLNQGMQWPALMQALALRPGGPPAFRLTGIGPPQPDNTDALQQVGWKLAQLADTIGVEFEFRGFVAASIADIDAAMLDIRLDEVVAVNSVFELHRLLARPGAVEKVLSSITSMKPKIVTLVEQESNHNGVVFMDRFNEALHYYSTMFDSLESSALTQPNSQQDLVMSEVYLGRQICNVVACEGPDRVERHETLTQWRTRMISAGFEPVHLGSNAFKQASMLLALFAGGDGYRVEENDGCLM

SEQ ID NO: 1347 - protein, 196 aa, Brassica oleracea
MWNHSKNGELEDDDESWEVKAFEQDTKGNIYGTTWPPRSYTCNFCRREFRSAQALGGHMNAHRRDRGSKAHQGPAVRSGGRSGGGRTTFLSSCVPPSTTLIIQSTASNSEGLSHFNQLQNPNGMFGNSSDMVNFYGTTPFPSGNLEFSLLNSSVEVPPRLIQYPTGDDEKAGSMKETTRTSVNEPDLELRLGHKPP

SEQ ID NO: 1348 - protein, 380 aa, Anisocarpus madioides
MKRSRERKKEASSVPDSGGMDELLEVLGYKVKSTDMADVAQKLEQLEMVMGEDGILQLSDTVHYNPSDLSGWVQSMLLVLNDNNTTTTADDSGHILLPGDSSTTMIDFSSETVVHGKPGSKIHQDDDLRAIAGGAIYRSESESSMPGNANPNGNGVKRMKTTAAGSEVVDVQPESPRPVVLVDSQEAGIRLVHTLMACAEAIQHNDLKLADALVKHVGILVASQAGAMAKVATYFAGALAQRIYNIYPQNALETSCYEILQMHFYETCPYLKFAHFTANQAILEAFAGAKRVHVIDFSLNQGMQWPALMQALALRSGGPPAFRLTGIGPPQPDNSDALQQVGWKLAQLADTIGVEFEFRGFVANSIADIDANMLDIRLPE

SEQ ID NO: 1349 - protein, 249 aa, Physalis peruviana
MAREKIKIKKIDNITARQVTFSKRRRGLFKKAEELSILCDADVALIIFSSTGKLFDFSSSSMKDILGKYKLQSANLDKVDQPFLDLQLENSLNVRLRKQVADKTRELRQMKGEELEGLSLEELQQIEKRLEAGFNRVLEIKGTRIMDEIANLQRKGAELMEENKKLKQKMEMMKLGKLPLLTDMDCMVMEEGQSSDSIITTNNVCSSNTGPPPEDDSSNASLKLGCNNGLAPVDDDCSITSLKLGLPLS

SEQ ID NO: 1350 - protein, 143 aa, Anisocarpus madioides
RPGAVEKVLSAITKMKPKIVTLVEQESNHNGALFMERFNEALHYYSTMFDSLESSALTLPNSPDDLVMSEVYLGRQICNVVACEGTDRVERHETLTQWRVRMNSAGFEPVHLGSNAFKQASMLLALFADGDGYRVEENDGCLM

SEQ ID NO: 1351 - protein, 247 aa, Physalis peruviana
MAREKIKIKKIDNITARQVTFSKRRRGLFKKAEELSILCDADVALIIFSSTGKLFDFSSSSMKDILGKYKLQSANLDKVDQPFLDLQLENSLNVRLRKQVADKTRELRQMKGEELEGLSLEELQQIEKRLEAGFNRVLEIKGTRIMDEIANLQRKGAELMEENKKLKQKMEMMKLGKLPLITEMECMVMEEGQSSDSIITTNNVCSSNTGPPPEDDSSNASLKLSCNNGLAPVDDDCSITSLKLGLS

SEQ ID NO: 1352 - protein, 542 aa, Argyroxiphium sandwicense subsp. macrocephalum
MKRSRERKKEAKTTSSVPDSGGMDELLEVLGYKVKSTDMADVAQKLEQLEMVMGEDGILQLSDTVHYNPSDLSGWVQSMLLVLNDNNNNTAHDSGHILLPGDSSTTMIDFSSEIVVHGKPGSKIHLDDDLRAIAGGAIYRSESESSMPGNGNPNENGVKRMKTTAAGSEVVDVQPESPRPVVLVDSQEAGIRLVHTLLACAEAIQHKDLKLADALVKHVGILVASQAGAMAKVATYFAGALAQRIYNIYPQNALETSCYEILQMHFYETCPYLKFAHFTANQAILEAFADATRVHVIDFSLNQGMQWPALMQALALRSGGPPAFRLTGIGPPQPDNSDALQQVGWKLAQLADTIGVEFEFRGFVANSIADINANILDIRAPETEVVAVNSVFEVHRLLARPGAVEKVLSSITGMKPKIVTLVEQESNHNGNVFMERFNEALHYYSTMFDSLESSALTLPNSQDDLVMSEVYLGRQICNVVACEGTDRVERHETLTQWRVRMNSAGFEPVHLGSNAFKQASMLLALFADGDGYRVEENDGCLM

SEQ ID NO: 1353 - protein, 213 aa, Panicum maximum
SKRRNGLLKKAYELSLLCDAEVALIIFSGRGRLFEFSSSSCMYRTLERYRSSNYTTQEVKTPLDGEINYQDYLKLKTRVEFLQTTQRNILGEDLGPLSMKELEQLENQIEVSLKHIRTRKNQMLLDQLFDLKSKEQELQDLNKDLRKKLQETNAENVLHVSWEEGGHSGTSGNAMEPYQGFLQHQENDPSLQIGYHQQAYIDQLNEDMADPNE

SEQ ID NO: 1354 - protein, 120 aa, Brassica napus
MTWCNESSDVQTVETIIPSPTVAESPEASFQVSCHKTCPSCGHKFKFHEQAGIHDLPGLPAGVKFDPTDQEVLGHLEGKVRDDARKLHPLIDEFIRTIDGENGICYTHPEKLPGVSTDGT

SEQ ID NO: 1355 - protein, 541 aa, Argyroxiphium sandwicense subsp. macrocephalum
MKRSRERKKEAKTTSSVPDSGGMDELLEVLGYKVKSTDMADVAQKLEQLEMVMGEDGILQLSDTVHYNPSDLSGWVQSMLLVLNDNNNTAHDSGHILLPGDSSTTMIDFSSEIVVHGKPGSKIHLDDDLRAIAGGAIYRSESESSMPGNGNPNENGVKRMKTTAAGSEVVDVQPESPRPVVLVDSQEAGIRLVHTLLACAEAIQHKDLKLADALVKHVGILVASQAGAMAKVATYFAGALAQRIYNIYPQNALETSCYEILQMHFYETCPYLKFAHFTANQAILEAFADATRVHVIDFSLNQGMQWPALMQALALRSGGPPAFRLTGIGPPQPDNSDALQQVGWKLAQLADTIGVEFEFRGFVANSIADIDANILDIRAPETEVVAVNSVFEVHRLLARPGAAEKVLSSITGMKPKIVTLVEQESNHNGNVFMERFNEALHYYSTMFDSLESSALTLPNSQDDLVMSEVYLGRQICNVVACEGTDRVERHETLTQWRVRMNSAGFEPVHLGSNAFKQASMLLALFADGDGYRVEENDGCLM

SEQ ID NO: 1356 - protein, 340 aa, Hordeum vulgare
  misc_feature (309)..(309): Xaa can be any naturally occurring amino acid
  misc_feature (312)..(313): Xaa can be any naturally occurring amino acid
MAYQYHHHQDHALGMDAAAAAAAGGNPGGGGFAPGLSAGGAWEGEKAAVEAHPLYERLLEAHVACLRVATPVDQLPRIDAQIAARAPPPMPPASALSGGEELDLFMTHYVLLLCSFKEQLQQHVRVHAMEAVMACWELEQTLQSLTGASPGEGTGATMSDDEDNPVDSESNMFDGNDVSDGMGFGMLTEGERSLVERVRQELKHELKQGYREKLVDIREEILRKRRAGKLPGDTASTLKAWWQAHAKWPYPTEEDKARLVQETGLQLKQINNWFINQRKRNWHSNPTSSSSDKSKRKRYNSRLKTPFSXARXXSLSLSLSPGWISFPLHSQKQNKKEQCR

SEQ ID NO: 1357 - protein, 203 aa, Thalictrum thalictroides
KRRNGLLKKAYELSVLCEAEVALIVFSSRGRLYEYSNNSVKKTIERYKKASTDSPNSGSVSEANVQFYQQEASKLRNQIASLQNHNRNLLGESLSNLNIRELKQIEKKIEGGISKIRAKKNELLFAEIEYMQKREIDLQTDNKYLRAMIAANERAPEHMNLMPANEYHVMSSAPFDSRNFMPANLLDHNNNYCRSDQTTLQLG

SEQ ID NO: 1358 - protein, 129 aa, Ligustrum ovalifolium
CTAKGIRDRRMRLSVQVARKFFDLQDMLGYDKASKTIDWLFTKSKKAIKELTKNHHQAKISSGNDNVKSECFVSGCEVALAIEENSKNEFKGVSATSVSPGNRHEKDDHLNYICKVVGKPKPNTRESRD

SEQ ID NO: 1359 - protein, 352 aa, Glycine max
MDGREGMAFPGGSAPYYMQHRGGGVGGSVPGTGTQSGGFQPPSGFRALSNVSPGSAFKVESQPQHASFSHGINTGSSPDGGSGVPSSGEPVKKKRGRPRKYGPDGSVSLMLSPMSATANSTPGSGTSSEKRPRGRPPGSGRKQQLATLGEWMNNSAGLAFSPHVITVGVGEDIVAKLLSFARQRPRAVCILTGTGTISSVTLRQPASTSISVTYEGRFQILCLSGSYLVAEEGGPHNRTGGMSVSLSSPDGHIIGGGVTRLVAASPVQVVACSFVYGGSKPKTKEVTTTTTTTKDSSSEPQSSDKLASPASAPPPNQNYTSSSPFPGIWPASSRPVEVKSAHPHTGIDLTRG

SEQ ID NO: 1360 - protein, 362 aa, Oryza sativa
MVTSKEFAWDQAAMDQKIKSDVGEVVLAGDEEEDGDVVLPGFRFHPTDEELVTFYLRRKVARKSLSIEIIKEMDIYKHDPWDLPNASTVGGEKEWYFFCLRGRKYRNSIRPNRVTGSGFWKATGIDRPIYSAAVNSNSGESIGLKKSLVYYRGSAGKGTKTDWMMHEFRLPPAIAAADASPCMQEAEVWTICRIFKRSITYRKQQQQQAWRPPATVTVKAPPPGDSSSNTGSFESDGGGDEFMNCGLTPAISQQQQHGGRHQMMSTMSCNGGYFFNDGIHHSHSHHKLHSQWGSLQMAPPEPKPEPEQKPLSSPAMTIAFHQNDHGFPAAAADFYKDGYLEEIARMMEVADPSPTGFYDCRY

SEQ ID NO: 1361 - protein, 292 aa, Glycine max
MQEAGLGMGMGMMSGEVSAAGDHHRQVKAEIANHPLYEQLLSAHVSCLRVATPIDQLPLIDGQLSQSHHLLRSYASHHSHSLSPHDRQELDNFMAQYLIVLCTFKEQLQQHVRVHAVEAVMACRDIESTLQALTGVSLGEGTGATMSDDEDDLQMDGSLDQSSADGHDMMGFGPLLPTESERSLMERVRQELKIELKQGFKSRIEDVREEILRKRRAGKLPGDTTSVLKAWWQQHAKWPYPTEDDKAKLVEETGLQLKQINNWFINQRKRNWHSNSQSVNSLKSKRKREYAH

SEQ ID NO: 1362 - protein, 191 aa, Cryptococcus neoformans var. neoformans B-3501A
MSEHTNLKSLAPLGNQPEPSANSAGVGPSKPFTEAQVEEFREQDRWLPIANVARIMKSSLPTSAKVSKEAKECVQECVSEFISFITSEAAEKCLNEKRKTLNGEDILTSMRALGFDNYEGVLRVYLAKYRDSHHSIPKRNAQHEDDDEEVQDGRKKRGRGRQPAGGTISTNGHAEGTKSKRKRSDDGKGVR

SEQ ID NO: 1363 - protein, 218 aa, Eleusine indica
SKRRNGLLKKAYELSLLCDAEVALIIFSAGRGRLFEFSSSSCMYKTLERYRTYNFNSHEVKAPLDSEINYQDYLKLKTRVEFLQTTQRNILGEDLGPLSNKELEQLENQIEISLKQIRSRKNQMLLDQLFDLKSKEQELHDLNKGLKKKLKETCGENATHISWEEGGNSGTSRNANEPYQGILQHAENNSSLQIGYHQQAYMEQLNNQDIGAAHNPNE

SEQ ID NO: 1364 - protein, 542 aa, Argyroxiphium kauense
MKRSRERKKEAKTTSSVPDSGGMDELLEVLGYKVKSTDMADVAQKLEQLEMVMGEDGILQLSDTVHYNPSDLSGWVQSMLLVLNDNNNNTAHDSGHILLPGDSSTTMIDFSSEIVVHGKPGSKIHLDDDLRAIAGGAIYRSESESSMPGNGNPNENGVKRMKTTAAGSEVVDVQPESPRPVVLVDSQEAGIRLVHTLLACAEAIQHNDLKLADALVKHVGILVALQAGAMAKVATYFAGALAQRIYNIYPQNALETSCYEILQMHFYETCPYLKFAHFTANQAILEAFADATRVHVIDFSLNQGMQWPALMQALALRSGGPPAFRLTGIGPPQPDNSDALQQVGWKLAQLADTIGVEFEFRGFVANSIADIDANILDIRAPETEVVAVNSVFEVHRLLARPGAVEKVLSSITGMKPKIVTLVEQESNHNGNVFMERFNEALHYYSTMFDSLEGSALTLPNSQDDLVMSEVYLGRQICNVVACEGTDRVERHETLTQWRVRMNSAGFEPVHLGSNAFKQASMLLALFADGDGYRVEENDGCLM

SEQ ID NO: 1365 - protein, 313 aa, Arabidopsis thaliana
MVDENVETKASTLVASVDHGFGSGSGHDHHGLSASVPLLGVNWKKRRMPRQRRSSSSFNLLSFPPPMPPISHVPTPLPARKIDPRKLRFLFQKELKNSDVSSLRRMILPKKAAEAHLPALECKEGIPIRMEDLDGFHVWTFKYRYWPNNNSRMYVLENTAGDFVNAHGLQLGDFIMVYQDLYSNNYVIQARKASEEEEVDVINLEEDDVYTNLTRIENTVVNDLLLQDFNHHNNNNNNNSNSNSNKCSYYYPVIDDVTTNTESFVYDTTALTSNDTPLDFLGGHTTTTNNYYSKFGTFDGLGSVENISLDDFY

SEQ ID NO: 1366 - protein, 146 aa, Glycine max
  misc_feature (82)..(82): Xaa can be any naturally occurring amino acid
KLITTVEQDLSHAGSFLARFVEALHYYSALFDALGDGLGADSLERHTVEQHLLGCEIRNIVAVGGPKRTGEVKLERWGDESXRIGFGPVSLRGNPAAQASLLLGMFPWRGYTLVEENGSLKLGWKDLSLLIASAWQPSDLMITYPD

SEQ ID NO: 1367 - protein, 544 aa, Argyroxiphium kauense
MKRSRERKKEAKTTSSVPDSGGMDELLEVLGYKVKSTDMADVAQKLEQLEMVMGEDGILQLSDTVHYNPSDLSGWVQSMLLVLNDNNNNNNTAHDSGHILLPGDSSTTMIDFSSEIVVHGKPGSKIHLDDDLRAIAGGAIYRSESESSMPGNGNPNENGVKRMKTTAAGSEVVDVQPESPRPVVLVDSQEAGIRLVHTLLACAEAIQHNDLKLADALVKHVGILVALQAGAMAKVATYFAGALAQRIYNIYPQNALETSCYEILQMHFYETCPYLKFAHFTANQAILEAFADATRVHVIDFSLNQGMQWPALMQALALRSGGPPAFRLTGIGPPQPDNSDALQQVGWKLAQLADTIGVEFEFRGFVANSIADIDANILDIRAPETEVVAVNSVFEVHRLLARPGAVEKVLSSITGMKPKIVTLVEQESNHNGNVFMERFNEALHYYSTMFDSLEGSALTLPNSQDDLVMSEVYLGRQICNVVACEGTDRVERHETLTQWRVRMNSAGFEPVHLGSNAFKQASMLLALFADGDGYRVEENDGCLM

SEQ ID NO: 1368 - protein, 338 aa, Brassica oleracea
MGRSPCCDQDKGVKKGPWVPEEDDKLTAYIEKNGYGNWRSLPKLAGLNRCGKSCRLRWMNYLRPDIRRGEFSDEEESTIVRLHALLGNKWSKIASHLPGRTDNEIKNYWNTHMRKKMLQMGIDPITHEPRTNDLSPILDVSQILAAAIGNGQFGNSNLINNNTALEDLLKLQLIHKMLQIITPKAIPNITSFTTNSLNPKLDSVVNSFTTNSVNPKPEQAAIQLNANEPHDFINQSANEDFMMPPFENIWDGFEDNQLPGLVTVSQKNLNSGTGMMPGYYGDQLSEIPSNGSISVSPETSGLNYPGTTQHLTGSDVLEDWEKFLDDETSHSCWKSFLE

SEQ ID NO: 1369 - protein, 324 aa, Hordeum vulgare subsp. vulgare
MPVGPTPGTAAGPPEVGGLPRSSAANEAAAGQQTRPNSMTERARMARVPQPEPALKCPRCDSTNTKFCYYNNYSLSQPRHFCKACRRYWTRGGALRSVPVGGGCRRNKRSSKSSAGAASSSKPSSSSARQLPGGASSMPSTATTTLGPDGASIPPGLSSMSHHLPFMGAMHPPGPNLGLAFSAGLPQLAMQQHHHHMDGVDQFPLASGGGATFGASLEQWRVQQQQQQQFPFLELPPAPPMYQLGLQANRAAGSSAAAPSPVMFTLGQSSASTSRRDEGSMKQTDSKGQEMTLQRHYMQWRLYPRGWRLGWQPSDNTAMAWHWQ

SEQ ID NO: 1370 - protein, 136 aa, Dubautia arborea
MKRSRERKKEAKTTSSVPDSGGMDELLEVLGYKVKSTDMADVAQKLEQLEMVMGEDGILQLSDTVHYNPSDLSGWVQSMLLVLNDNNNNNTAHDSGHILLPGDSSTTMIDFSSEIVVHGKPGSKIHLDDDLRAIAG

SEQ ID NO: 1371 - protein, 665 aa, Oryza sativa
MEEFELQQQPYYSKLLLGSPLEIANVDDSDLQLVAGVPSDPPPAPPTAVKKKKKRSLPGTPDPSAEVVALSPRTLLATNRFVCEICGKGFQRDQNLQLHRRGHNLPWKLRQRGGAGGGGGGEPPRKRVYVCPEASCVHHSPSRALGDLTGIKKHFCRKHGEKKWKCDRCGKRYAVHSDWKAHSKVCGTREYKCDCGTVFSRRDSFVTHRAFCDALAQENNKLAQPMNMAAVTSALQGQQQAHHPVADDDDAAGVKSPHLKMFPDVDNIVAAATAGNPLLPPPLSMAGCMLSSLAAPLSSPFLPGCKLGVDAARDAAMVFPPPPPPAGSAAAIMSATALLQKAAELGATTSTGCYGGVAFPAMGIAGGLDRLPAIGHHLAPYDDVVVPAALQGQTATQLVGFDLGGLLPGQLYGGGGGAMTRAIGSLMHGGDQHAALDHRACSKIPRFRMEDGGKHFVFVHGLGHGAWCWYRVVAALRAAGHRATALDMAAAGAHPARADEVGSLEEYSRPLLDAVAAAAPGERLVLVGHSLGGLSLALAMERFPDKVAAAVFLAACMPAAGKHMGITLEEDLTLATMLVRPGTNYIDDPIMKDETLLTEGNYGSVKRVFLVAMDDASSDEEMQRWTIDLSPGVEVEELAGADHMAMCSKPRELCDLLLRIAAKYD

SEQ ID NO: 1372 - protein, 157 aa, Triticum aestivum
  misc_feature (40)..(40): Xaa can be any naturally occurring amino acid
  misc_feature (46)..(46): Xaa can be any naturally occurring amino acid
  misc_feature (52)..(52): Xaa can be any naturally occurring amino acid
STHYHFSADVGSEASPVGLPGRVFIGKLPEWSPDVRLFTXYEYPRXNMLRDXDVHGTMGLPVFEKGSYSCLGVMELIMTRQKLNFTSEINDICRALQAVNLRSTEVSSTPRATKFNSASYKDALPEILEVLRAACVTHNLPLAQTWVTCAQQGKGGS

SEQ ID NO: 1373 - protein, 129 aa, Brassica napus
PSLLSPPLLLARARFYKGFGARDGRRRQREPRGGGGVREQDRFLPIANISRIMKKAVPANGKIAKDAKETLQECVSEFISFVTSEASDKCQKEKRKTINGDDLLWAMATLGFEEYVDPLKIYLQKYRDM

SEQ ID NO: 1374 - protein, 586 aa, Brassica oleracea
MSSTNVQLTDHHLNQSTNGTNLWSTIEDNASVMEPLIGSEHSSLWPQPPLTPPPPHVTEDTLQQRLQALIEGARESWTYAVFWQLSHDFAGEDISNTAALLTWGDGYYKGEEERKSRKRKPNPVSAAEQEHRKRVIRELNSLISGGGGTVSSSGGSSDEAGDEDVSDTEWFFLVSMTQSFVNGSGLPGRAFSSSRTIWLSGSNALAGSSCERARQGQVYGLETMVCIPTQNGVVELGSLEIIHQSSDLVEKVNSFFSFNGGGGGGESGSWEFNLNPDQGENDSATWINEPIVTGIEPVLGAPATSNSDSQTASKLCNGSSVEHPKQQQNPQISSSGFVEGDSNKKKRCLVSDKEEEMLSFTSVLPLPTKSNDSNRSDLEASVVKEAESGRIVAETEKKPRKRGRKPANGREEPLNHVEAERQRREKLNQRFYSLRAVVPNVSKMDKASLLGDAISYINELKAKLQKAEADKEELQKQIDGMSKEVGDGNVKSLVKDQKCLDQDSGVSIEVEIDVKIIGWDAMIRIQCAKKNHPGAKFMEALKELELEVNHASLSVVNEFMIQQATVKMGNQFFTQDQLKAALMERV

SEQ ID NO: 1375 - protein, 534 aa, Dubautia arborea
ERKKEAKTTSSVPDSGGMDELLEVLGYKVKSTDMADVAQKLEQLEMVMGEDGILQLSDTVHYNPSDLSGWVQSMLLVLNDNNTNNTAHDSGHILLPGDSSTTMIDFSSEIVVHGKPGSKIHLDDDLRAIAGGAIYRSESESSMPGNGNGVKRMKTTVAGSEVVDVQPESPRPVVLVDSLEAGIRLVHTLMACAEAIQHNDLKLADALVKHVGILVASQAGAMAKVATYFAGALAQRIYNIYPQNALETSCYEILQMHFYETCPYLKFAHFTANQAILEAFAGATRVHVIDFSLNQGIQWPALMQALALRSGGPAAFRLSGIGPPQPDNSDALQQVGWKLAQLADTIGVEFEFRGFVANSIADIDANILDIRAPETEVVAVNSVFEVHRLLARPGAVEKVLSSITGMKPKIVTLVEQESNHNGNVFMERFNEALHYYSTMFDSLESSALTLPNSQDDLVMSEVYLGRQICNVVACEGTDRVERHETLTQWRVRMNSAGFEPVHLGSNAFKQASMLLALFADGDGYRVEENDGCLM

SEQ ID NO: 1376 - protein, 293 aa, Triticum aestivum
  misc_feature (268)..(268): Xaa can be any naturally occurring amino acid
MGRPSSGGVGQPKLRKGLWSPEEDEKLYNHIIRHGVGCWSSVPRLAGLNRCGKSCRLRWINYLRPDLKRGCFSQQEEDHIVALHQILGNRWSQIASHLPGRTDNEIKNFWNSCIKKKLRQQGIDPATHKPMAAADTATAPLPDPEEEDRKPLSAAVGGSLAPKQPAVFDPFPVCADYGGGFAHGLGAENAAALYGQLVGCKEGADDDAGFGGADYSSVLDVSENLGYGESSSNSSNWNYGGEVGSVLDGEVPHWGKADMEQQHTPLEXKLSLPCQEQSLLASFDFHWDWDPYF

SEQ ID NO: 1377 - protein, 203 aa, Thalictrum thalictroides
KRRNGLLKKAYELSVLCEAEVALVVFSNRGRLYEYANNSVRKTIDRYKKTCGEGSSTLTVSEANLLFYQQESSKMKQQIEILQNSNRHLMGEALSRLSIKELKQLESRLEKGLSRIRSKKNETLLAEIEYMQKREIELHNDNIYLREQITANERAQQHMNSLPGNVYEAITSAPHSSRDFFQVNLRDSKPNQYCSDATVLQLC

SEQ ID NO: 1378 - protein, 537 aa, Dubautia knudsenii
ERKKEAKTTSSVPDSGGMDELLEVLGYKVKSTDMADVAQKLEQLEMVMGEDGILQLSDTVHYNPSDLSGWVQTMLLVLNDDNNNTADDSGHILLPGDSSTTMIDFSSEIVVHGKPGSKIHLDDDLRAIAGGAIYRSESESLMPGNGNPNGNGVKRMKTTVAGSEVVDVQPESPRPVVLVDSQEAGIRLVHTLMACAEAIQRNELKLADALVKHVGILVASQAGAMAKVATYFAGALAQRIYNIYPQNALETSCYEILQMHFYETCPYLKFAHFTANQAILEAFAGATRVHVIDFSLNQGMQWPAFMQALALRYGGPPAFRLTGIGPPQPDNSDALQQVGWKLAQLANTIGVEFEFRGFVANSIADIDANILDIRAPETEVLAVNSVFEVHRLLARPGAVEKVLSSITGMKPKIVTLVEQESNHNGNVFMERFNEALHYYSTMFDSLESSALTLPNSQDDLVMSEVYLGRQICNVVACEGTDRVERHETLTQWRVRMNSAGFEPVHLGSNAFKQASMLLALFADGDGYRVEENDGCLM

SEQ ID NO: 1379 - protein, 310 aa, Oryza sativa (japonica cultivar-group)
MGRPPCCVKAEVKKGPWTPEEDLMLVAYVQEHGPGNWRAVPTNTGLMRCSKSCRLRWTNYLRPGIKRGNFTDQEEKLIVHLQALLGNRWAAIASYLPERTDNDIKNYWNTHLKKKLKKMSATGGGGDDGEGGGAGEVKTRAAAPKGQWERRLQTDIHTARQALRDALSLDPSPPAKPLDSSSGATAPPSSQAATSYASSAENIARLLEGWMRPGGGGGKTTTTPSSGSRSSAASVLSGEASHSGGATAPTPDGSTVTSKTKDEETAGAPPPPPPPAFSMLESWLLDDGMGHGEVGLMDVVVPLGDPSEFF

SEQ ID NO: 1380 - protein, 231 aa, Triticum aestivum
  misc_feature (151)..(151): Xaa can be any naturally occurring amino acid
  misc_feature (157)..(157): Xaa can be any naturally occurring amino acid
GRPLLPRGAGLLPSITNLSVRDRINQKMQTLQKLVPNSSKTDKASMLDEVIDHLKQLQATLQMMNRMSSMMMPMAMPQLAQMSVMANMAQMAQMAQMGLGMINMAGPLAQPAYPGLTQPMMHASPPFVAMQPWNAGAGADRQKQPAAAAVXDAYSAXFLACQAAQQNTQQQQQAQPNGLEAYSRMMAMCPKLSQQQTRPGHLQRRVRTTSYKPPASYFPLDPKIRPRPPPP

SEQ ID NO: 1381 - protein, 352 aa, Solanum demissum
MEVETHMSFRTAEKISILVVNDDATYLPVVAGLLKKCNYQVVTVKYPIDALSKLRIKGDSFDLVVTDVHKSDINGFELQQVITQAFEIPVLLMSADDKEGTILKGLKGVSVDDQRDQGPCTALQVKRGKKPVPGKSAMKLGKQGKDNSVNFVLPTKSQIIWTDSLHNTFLEAISNIGFDKAVPKKIHEHMKVPGLSRENVASHWQKYRIYLRRVTDASSSIQVPDINLASRANQSTIASGTLGKHRQFHQENFGVQSSVPSLLIHTTGYRTGSLQHLKNKGKEVDDVLDPVRNFSVFHNVSATQGSQGIGDLSASSMNQGNDQPHQQNNEDEALVNFDGGFNQDMEKEDYLQ

SEQ ID NO: 1382 - protein, 196 aa, Arabidopsis arenosa
MGRKKLEIKRIENKSSRQITFSKRRNGLIEKARQLSVLCDASVALLVVSASGKLYSFSSGDNLVKILDRYGKQHADDLKALDIQSKALNYGPHHELLELVESKLVGSNVNNVSADTLVQLEEHLGTALSVTRAKKKELMLKLVENLKEKEKLLKEENQVLASQMKRNHHVGAEAEMETSPAGQISDNLPVTLPLLN

SEQ ID NO: 1383 - protein, 245 aa, Lolium temulentum
MGRGKVQLKRIENKINRQVTFSKRRSGLLKKAHEISVLCDAEVGLIIFSTKGKLYEFATDSCMDKILERYERYSYAEKVLISTESEIQGNWCHEYRKLKAKVETIQRCQKHLMGEDLESLNLKELQQLEQQLESSLKHIRSRKSQLMHESISELQKKERSLQEENKILQKELIEKQKAHTQQAQLEQTQPQTSSSSSSFMMGEATPATNRSNPPAAASDRAEDATGQPPARTVLPPWMVSHLNNG

SEQ ID NO: 1384 - protein, 173 aa, Oryza sativa
  misc_feature (33)..(33): Xaa can be any naturally occurring amino acid
MARPQQRYRGVRQRHWGSWVSEIRHPLLKTRIXWLGTFETAEDAARAYDEAARIMCGPRARTNFPLADATAAAAAAAASSSFLSAALVAKLHRFNLASVQATQRQREAAATAAAASSASATTPPLGNAAAADDDARTTTTYGAEWSGRFLEEQHVEQMIDELLDSNFSMEICY

SEQ ID NO: 1385 - protein, 196 aa, Arabidopsis arenosa
MGSKKLEIKRIENKSSRQVTFSKRRNGLIEKARQLSVLCDASVALLVVSASGKLYSFSSGDNLVKILDRYGKQHADDLKALDIQSKALNYGSHHELLELVESKLVGSNVKNVSVDTLVQLEEHLGTALSVTRAKKTELMLKLVENLKEKEKLLKAENQVLASQMKKNHHVGAEAEMEISPAGQISDNLPVTLPLLN

SEQ ID NO: 1386 - protein, 205 aa, Kluyveromyces lactis NRRL Y-1140
MDTETEAEKQERHNNYLNELAEQDRWLPINNVARLMKNTLPATTKVSKDAKECMQECVSEFISFVTSEACDRCTSGKRKTINGEDILLSLHALGFENYAEVLKIYLAKYRQQQAIKNQMMYPKEDVEGSYTEEESRAEDADHVTQERQQPLHPVPSSASTTTSTEVSASEHVQSSSKSTHNPAQAQPRIVVQQPLGSRHSTADHL

SEQ ID NO: 1387 - protein, 196 aa, Arabidopsis suecica
MGSKKLEIKRIENKSSRQVTFSKRRNGLIEKARQLSVLCDASVALLVVSASGKLYSFSSGDNLVKILDRYGKQHADDLKALDIQSKALNYGPHHELLELVESKLVGSNVNNVSADTLVQLEEHLETALSVTRAKKKELMLKLVENLKEKEKLLKAENQVLASQMKKNHHVGAEAEMEISPAGQISDNLPVTLPLLN

SEQ ID NO: 1388 - protein, 188 aa, Arabidopsis thaliana
MLVYGILNDAFHGGWEPSSSSSDEDRSSFPSVKIETPESFAAVDSVPVKKEKTSPVSAAVTAAKGKHYRGVRQRPWGKFAAEIRDPAKNGARVWLGTFETAEDAALAYDRAAFRMRGSRALLNFPLRVNSGEPDPVRIKSKRSSFSSSNENGAPKKRRTVAAGGGMDKGLTVKCEVVEVARGDRLLVL

SEQ ID NO: 1389 - protein, 358 aa, Arabidopsis thaliana
MCGGAIISDFIPPPRSRRVTSEFIWPDLKKNLKGSKKSSKNRSNFFDFDAEFEADFQGFKDDSSIDCDDDFDVGDVFADVKPFVFTSTPKPAVSAAAEGSVFGKKVTGLDGDAEKSANRKRKNQYRGIRQRPWGKWAAEIRDPREGARIWLGTFKTAEEAARAYDAAARRIRGSKAKVNFPEENMKANSQKRSVKANLQKPVAKPNPNPSPALVQNSNISFENMCFMEEKHQVSNNNNNQFGMTNSVDAGCNGYQYFSSDQGSNSFDCSEFGWSDQAPITPDISSAVINNNNSALFFEEANPAKKLKSMDFETPYNNTEWDASLDFLNEDAVTTQDNGANPMDLWSIDEIHSMIGGVF

SEQ ID NO: 1390 - protein, 371 aa, Medicago truncatula
MSLMKVFRSRKYSKSFKEVQSIDTVADDRRDAGGESADGTDWSTMLPDLLAEIIKRVDVAEEQWPHRQNVVACACVCKRWRDITREIVKSPQRNGTITFPSCLKQPGPRDLPHHCLIKRSKKTSTFYLYLALTSSFSDKGKFLLAARRYRCGTHTEYAISLDADDLSQGSNAYVGKLSSDFLGTNFTIYDSQPPHNGAKPSCARASRRFASKQISPQVPAGNFEAGDVSYKFNLLKSRGPRRMMCSLKFPVPSVGESSDSKSFDGQKMHSKEHAASAHTILKNKAPRWHEHLQCWCLNFHGRVTVASVKNFQLVATVDQSQPGGKGDEETVLLQFGKVGDDTFTMDYRQPLSAFQAFAICLTSFGTKLACE

SEQ ID NO: 1391 - protein, 367 aa, Medicago truncatula
MKLFRSLKLFRYFSNVKALNATNDDTVGSESEDKTDWSTMLPEVLADIIKRVDVIGEQWPHRRNVVACACVCKRWRDITREVVGSPSLNGKITFPSCLKQPGPRDLPHHCVVNWNKKTSTFYLYLALTPSLTDNGKFLLAARRYRFVTHTEYVISLDANDFSQGSNAYVGKLSSDFLEANFTIYDASAGAKPSSDRTSRRFASKQISPQFPAGNVEAGNISYKKFSLLKPKRPRRMICSLKSPVSSICESSDSKSFDNHTMHCKEQATSSAYTILKNKAPMWNEQLECWFLNFHERKDMTVASVKNFQLVATVDQSQPGGKGDEETVLLQFCKVGGDTFTMYYRQPLSAFHAFAICLTSFGTKLACQ

SEQ ID NO: 1392 - protein, 213 aa, Brassica rapa
MVRGKTQMKRIENATSRQVTFSKRRNGLLKKAFELSVLCDAEVSLIIFSPKAKLYEFASSNMQDTIDRYLRHTKDRVSTKPVSEENLQHLKHEAANMMKKIEQLEASKRKLLGEGIGSCSIEELQQIEQQLEKSVKCIRARKTQVFKVQIEQLKQKEKALAAENKKLTEKWGSHEIEVWSNKNQESGRGDEESSPSSEVETELFIGLPCSSRK

SEQ ID NO: 1393 - protein, 748 aa, Glycine max
MDADSSGEEVVIKTRKPYTITKQRERWTEEEHNRFLEALKLYGRAWQRIEEHIGTKTAVQIRSHAQKFFTKLEKEAFVKGVPIGQALDIDIPPPRPKRKPSNPYPRKTNVGAPTLHSEAKHGKSLISIASSHGKQALDLEKEPLPEKHNVDLRPTTVKENKDGSCLNVFTIIQEAPCSSVSSANKNSTSISVPLRNSCALREFIPSVKEVITRDETNESFVTDELENQKLEIDDGKHTQKTNDTCEVSKLENSGASELVQTEKTDGRNCALTIDGVPGNQNYPRHVPVHVVDGNLGTSTQNLSPDMVFQDSIFQPKGGVNRQPNLVTNSATSHISECQNNAARSSIHQSFPPSPPFAQDDYHSFLHMSSTFSSLIVSTLLQNPAAHAAASFAATFWPYANAETSADSPVCTPDFPSRQIGSPPSVTAIAAATVAAATAWWAAHGLLPLCGPLHTAFACPPASATTVPSMIIDESPQKTERGEIKPQNPPLQDQIPDPEHSEAQHSAPKSPAVSSSKSEDRGDANLDTSPKATNHEMNQAISENPDSNKMKGRKPVDRSSCGSNTTSSSEETELLEKDEKEKEEPKTPDANVLDTELSNRRSRSISNLTDSWKEVSEEGRLAFQALFSREVLPQSFSPTHHLINKDNQIDSIKDNELNTDYKDEDLESKKCSSICDGVQKNLLFVKDNNEEEGLLTIGLGPGKLKTRRTGFKPYKRCSVEANENRIGTACIQGEEKGPKRLRLNGEAST

SEQ ID NO: 1394 - protein, 294 aa, Zea mays
MLLNPACEAAAPMDSIRHHLLDEPAAAATASAAPRPVYCRSTSFGSLVADQWSESLPFRPDDADDMVVFGALRDAFSQGWLPDGSFAAVKPEPLAFPDSPYERGSYPCLGGFLLAEGPETPTEAATTPGSEEEAAAAVSRGKHYRGVRQRPWGKFAAEIRDPAKNGARVWLGTYDSAEDAAVAYDRAAYRMRGSRALLNFPLRIGSEIAAAAAAVAATAPAAGDKRASPEPTASSDSSPSASSATPKRRKRGEAAAATMAMALVPPPPAAQAPVQLTLPARPWFAAGPVQQLVS

SEQ ID NO: 1395 - protein, 537 aa, Dubautia menziesii
ERKKEAKTTSSVPDSGGMDVLLEVLGYKVKSTDMADVAQKLEQLEMVMGEDGILQLSDTVHYNPSDLSGWVQSMLLVLNDNNNNTAHDSGHILLPGDSSTTMIDFSSEIVVHGKPGSKIHLDDDLRAIAGGAIYRSESESSMPGNGNPNGNGVKRMKTTVAGSEVVDVQPESPRPVVLVDSQEAGIRLVHTLMACAEAIQHNDLKLADALVKHVGILVASQAGAMAKVATYFAGALAQRIYNIYPQNALETSCYEILQMHFYETCPYLKFAHFTANQAILEAFAGATRVHVIDFSLNQGMQWPALMQALALRSGGPPAFRLTGIGPPQPDNSDALQQVGWKLAQLADTIGVEFEFRGFVANSIADIDANILDIRAPETEVVAVNSVFEVHRLPRRPGAVEKVLSSITGMKPKIVTLVEQESNHNGNVFKERFNEALHYYATMFDSLESSALTLPNSQDDLVMSEVYLGRQICNVVACEGTDRVERHETLTQWRVRMNSAGFEPVHLGSNAFKQASMLLALFADGDGYRVEENDGCLM

SEQ ID NO: 1396 - protein, 270 aa, Hordeum vulgare subsp. vulgare
LKKPDKILPCPRCSSMDTKFCYYNNYNINQPRHFCKNCQRYWTAGGAMRNVPVGAGRRKSKSISAASHFLQRIRAALPGDPLCTPVNTNGTVLSFGSDASTLDVVSEQMKHMKELSSVTRTENTDAPSVGSCAEGWAKGEESSQMNSRERVAADRSPNFAQHPCMNGAAMWPFSCAPSPAYFTPNVAIPFYPAAAAAYWGCMVPGAWNTPWQPQPQPQSQCQSSSPPSAASPVSTMSSCFQSRKHPRDGDEERDTKGNGKVWVPKTIEST

SEQ ID NO: 1397 - protein, 193 aa, Brassica napus
  misc_feature (161)..(161): Xaa can be any naturally occurring amino acid
  misc_feature (170)..(170): Xaa can be any naturally occurring amino acid
  misc_feature (185)..(185): Xaa can be any naturally occurring amino acid
MVQNLISDESFSSTTMVMQEHCESLCDRASDELIISSTDAFCLKTRKPYTITKQREKWTEAEHEKFVEALKLYGRAWRRIEEHVGTKTAVQIRSHAQKFFTKVARDCGVTSEKSIEIPPPRPKRKPMHPYPRKLVIPDAKEMAYAGKLVPDEDSRSPTSVXSAHGSDGLXSIGSNSPNSSSADYXVHELSSHT

SEQ ID NO: 1398 - protein, 303 aa, Magnetospirillum magnetotacticum MS-1
MTFNTLKFPPAMAAVLTRTRDYLQEEIGLKVSRAKPRTGNVDSLQLRDITAVVCTDGPIKLMIVFSFQRVLLEHIREVVTARLKVLPEERELFLRETAGETVNFILGHATADLAETGNVMHLSPPSILDEERNILRPKKAIFTTIEMATSHGILDINFIGPSELFDQKLNVIEEEETQGGEMHPLKVLIVDDSLLTVRTLTGMLTELGHLVVQTAGSGALALEAYRRSKPDLVTMDITMPDMDGIEATSGILKEFPEANIIMVTSHGQQGMVMNAVKAGAKGYVLKPIKLEKLRDMIARVFKT

SEQ ID NO: 1399 - protein, 539 aa, Dubautia raillardioides
ERKKEAKTTSSVPDSGGMDELLEVLGYKVKSTDMADVAQKLEQLEMVMGEDGILQLSDTVHYNPSDLSGWVQTMLLVLNDDNNTTADDSGHILLPGDSSTTMIDFSNSSETVVHGKPGSKIHLDDDLRAIAGGAIYRSESESSMPGNGNPNGNGVKRMKTTVAGSEVVDVQPESPRPVVLVDSQEAGIRLVHTLMACAEAIQHNDLKLADALVKHVGILVASQAGAMAKVATYFAGALAQRIYNIYPQNALETSCYEILQMHFYETCPYLKFAHFTANQAILEAFAGATRVHVIDFSLNQGMQWPALMQALALRSGGPPAFRLTGIGPPQPDNSDALQQVGWKLAQLANTIGVEFEFRGFVANSIADIDANILDIRAPETEVVAVNSVFEVHRLLARPGAVEKVLSSITGMKPKIVTLVEQESNHNGNVFMERFNEALHYYSTMFDSLESSALTLPNSQDDLVMSEVYLGRQICNVVACEGTDRVERHETLTQWRVRMNSAGFEPVHLGSNAFKQASMLLALFADGDGYRVEENDGCLM

SEQ ID NO: 1400 - protein, 178 aa, Hordeum vulgare subsp. vulgare
STAGDDAVAAGRRKAGTPPALPPPPAEQAVRCPRCDSPNTKFCYYNNYSLSQPRHFCKTCRRYWTKGGALRSVPVGGGCRKNKRSRSGSSAASASRGLSLTTPAGGTADQDQHAARMSVGGFPAGGGGGDFRGVVGMLPVLHSPAVVGQYVPFGDWSSGETNGGGRGTNGSAGTGNGA

SEQ ID NO: 1401 - protein, 537 aa, Dubautia microcephala
ERKKEAKTTSSVPDSGGMDELLEVLGYKVKSTDMADVAQKLEQLEMVMGEDGILQLSDTVHYNPSDLSGWVQTMLLVLNDDNNNAADDSSHILLPGDSSTTMIDFSSEIVVHGKPGSKIHLDDDLRAIAGGAIYRSESESLMPGNGNPNGNGVKRMKTTVAGSEVVDVQPESPRPVVLVDSHEAGIRLVHTLMACAEAIQRNDLKLADALVKHVGILVASQAGAMAKVATYFAGALAQRIYNIYPQNALETSCYEILQMHFYETCPYLKFAHFTANQAILEAFAGATRVHVIDFSLNQGMQWPAFMQALALRSGGPPAFRLTGIGPPQPDNSDALQQVGWKLAQLANMIGVEFEFRGFVANSIADIDANILDIRAPETEVVAVNSVFEVHRLLARPGAVEKVLSSITGMKPKIVTLVEQESNHNGNVFMERFNEALHYYSTMFDSLESSALTLPNSQDDLVMSEVYLGRQICNVVACEGTDRVERHETLTQWRVRMNSAGFEPVHLGSNAFKQASMLLALFADGDGYRVEENDGCLM

SEQ ID NO: 1402 - protein, 221 aa, Arabidopsis thaliana
  misc_feature (174)..(174): Xaa can be any naturally occurring amino acid
MAESQAKSPGGCGSHESGGDQSPRSLHVREQDRFLPIANISRIMKRGLPANGKIAKDAKEIVQECVSEFISFVTSEASDKCQREKRKTINGDDLLWAMATLGFEDYIDPLKVYLMRYREMEGDTKGSGKGGESSAKRDGQPSQVSQFSQVPQQGSFSQGPYGNSQGSNMMVQMXAQSSTRTLFITIFRDSTMPVVSENLSDPLSIDMDCGISVFGREKICI

SEQ ID NO: 1403 - protein, 280 aa, Glycine max
  misc_feature (279)..(279): Xaa can be any naturally occurring amino acid
MLQSLVPRSPRTSNPNAMKTKRAVDAGGDSPADEPSFKRTNFSGEKTTAEAEEEQAFDPEPHGGDSTGLKLLGLLLQCAECVAMDNLDFANDLLPEIAELSSPYGTSPERVGAYFAQALQARVVSSCIGSYSPLTAKSVTLTQSQKIFNAFQSYNSVSPLVKFSHFTANQAIFQALDGEDRVHIIDLDIMQGLQWPGLFHILASRSKKIRSVRITGFGSSSELLDSTGRRLADFASSLGLPFEFFPVEGKIGSVTELSQLGVRPNEAIVVHWMHHCLYXI

SEQ ID NO: 1404 - protein, 217 aa, Triticum aestivum
  misc_feature (111)..(111): Xaa can be any naturally occurring amino acid
  misc_feature (124)..(124): Xaa can be any naturally occurring amino acid
  misc_feature (138)..(138): Xaa can be any naturally occurring amino acid
  misc_feature (147)..(147): Xaa can be any naturally occurring amino acid
  misc_feature (154)..(154): Xaa can be any naturally occurring amino acid
PAGTGPEFGGGAAGPGKKKGMPAKNLMAERRRRKKLNDRLYMLRSVVPKISKMDRASILGDAIEYLKELLHKISDLQNELESSPSMPSLPPTPTSFHPLTPTLPALPSRVXKEELCPSALPKPXTGQQPTVEVRLREXPGPSNIHIXCALARPXALWLSAMKAIEALGLDVQQAVISCFNGFALDVFKAEQCKDGPGLQPEEIKAVLLQSAGFHPAM

SEQ ID NO: 1405 - protein, 257 aa, Populus tomentosa
CQSIAGRMDWDNNQENHQDSHQNQRECRNGINGTNVNVNVNGNGGNNTLYVKVMTDEQLETLRKQIAVYAAICEQLVEMHKTLSAQQDLAGGRLGNLYCDPLMASGGHKITARQRWTPTPVQLQILERIFDQGNGTPSKQKIKEITSELSQHGQISETNVYNWFQNRRARSKRKQLVASSNNAESEVETEVDSLNEKKKPEIFHAQQNPPRAEDLCFQGPEISSELHFLGDDHLTGKMGVPGNYNLYDQAEDYGMAG

SEQ ID NO: 1406 - protein, 227 aa, Capsella rubella
RGKIEIKRIENTTNRQVTFCKRRNGLLKKAYELSVLCDAEVALIVFSSRGRLYEYSNNSVKGTIERYKKAISDNSNTGSVAEINAQYYQQESAKLRQQIISIQNSNRQLMGETIGSMSPKELRNLEGRLERSITRIRSKKNELLFSEIDYMQKREVDLHNDNQILRAKIAENERNNPSISLMPGGSNYEQLMPPPQTQPQPFDSRNYFQVAALQPNNHHYSSAGGRQ

SEQ ID NO: 1407 - protein, 226 aa, Capsella bursa-pastoris
RGKIEIKRIENTTNRQVTFCKRRNGLLKKAYELSVLCDAEVALIVFSSRGRLYEYSNNSVKGTIERYKKAISDNSNTGSVAEINAQYYQQESAKLRQQIISIQNSNRQLMGETIGSMSPKELRNLEGRLERSITRIRSKKNELLFSEIDYMQKREVDLHNDNQILRAKIAENEKNNPSISLMPGGSNYEQIMPPPQTQPQPFDSRNYFQVAALQPNNHHYSSAGRQ

SEQ ID NO: 1408 - protein, 226 aa, Capsella bursa-pastoris
RGKTEIKRIENTTNRQVTFCKRRNGLLKKAYELSVLCDAEVALIVFSSRGRLYEYSNNSVKGTIERYKKAISDNSNTGSVAEINAQYYQQESAKLRQQIISIQNSNRQLMGETIGSMSPKELRNLEGRLERSITRIRSKKNELLFSEIDYMQKREVDLHNDNQILRAKIAENERNNPSISLMPGGSNYEQIMPPPQTQPQQFDSRNYFQVAALQPNNHHYSSAGRQ

SEQ ID NO: 1409 - protein, 174 aa, Brassica napus
DLPLRHYSSDQSHQPSLLTASFLHLPPTTATTDSEFTHPHRDGDSPAAAATNRRWLSFHTEVENTEEVNPEVNADGVEDWKSASDKAAILKHPMYEQLLAAHVACLRVATPVDQIPRIDAQLSQLHTVAAKYSSLGVGMDNKELDHFMSHYVVVLCSFKEQLQHHVCVHALEAI

SEQ ID NO: 1410 - protein, 256 aa, Impatiens balsamina
MADLPSESMELLDISGQRKNGRGKIEIKRIENTTNRQVTFCKRRNGLLKKAYELSVLCDAEVALVVFSSRGRLYEYANNSVRGTIERYKKASSDTPNTAGSVAEANAQFYQQESSKLRQQIGNLQNSNRQILGESLSSMNLRDLKSLESRLERSISKIRSKKNELLFAEIDFMQKREVDLHNNNQFLRAKISESERAQQQQQHQQTQINLMPGGSNYELVQSQAQTSFDNRNFFQVTALQPDNQYSRDDQTPFQLV

SEQ ID NO: 1411 - protein, 246 aa, Psathyrostachys fragilis
SHHQHPLPHPPSSGGPDAFSYYYYYPPFSAAAATTDYPTPPAVSRSRAAVRKDRHSKICTAGGMRDRRMRLSLDVARRFFALQDKLGFDKASKTVQWLLDRSTAGINHLATSMSASMSLSEEDGSLLLDLDNNDHAMSMAADAETNKQQQQEHQTTKAKRRSAPAAPRKKRNNGGAPVLLPDKASRARARQRARERTKERNRLRSEAQAPAPLPARQPVVPAAACSNSYYEEGEQEPWELGGVVFA

SEQ ID NO: 1412 - protein, 256 aa, Saussurea medusa
MVRAPCFDKHGIKRGAWSQEEDNKLRAHIQRSGHSNWRQLPKLAGLSRCGKSCRLRWVNYLRPTIKHGNFTKDEKDVVVALHNKLGNKWSAIAARLPGRSDNEIKNYWHTHLKNRAQTDQTVLQTKQDGNAETSKGKGTPKAGCVVRKPNVKSQQEVEILLAVLSSASSSSFSSSTTSDQNESSPPSLSVSDANVTPQCSEEAARSLCIDQFLVEEDSIMLSSDKMYSPLGSVDYFISQDNVMDDVLLWPNLDFYY

SEQ ID NO: 1413 - protein, 249 aa, Antirrhinum hispanicum subsp. mollissimum
ATSVVDLNGNEIQLHDMLSGHYLTTANAPVLESTALFNNNNNFNHDVVNGLNRDPSPTFPTKQAVKKDRHSKIYTSQGPRDGRVRLSIGIARKFFDLQEMLGFDKPSKTLDWLLTKSKTAIKELVQSKSTKSNSSSPCDDCEEVVSVESENVTDHSKGKSLKANNKCKEAMDSHQAAAKESRAKARARARERTKEKMCIKQLNEAIVLRNHQFEVSGTREAFVHPVFGFHQQNYGSTSHENWDQSNFAS

SEQ ID NO: 1414 - protein, 187 aa, Leymus triticoides
  misc_feature (170)..(170): Xaa can be any naturally occurring amino acid
  misc_feature (176)..(177): Xaa can be any naturally occurring amino acid
  misc_feature (179)..(180): Xaa can be any naturally occurring amino acid
  misc_feature (184)..(184): Xaa can be any naturally occurring amino acid
SHHQHPLPRPPSSGGPDAFSYYYYYPPFSAAAATTDYPTPPAVSRSRAAVRKGRHSKICTAGGMRDRRMRLSLDVARRFFALQDKLGFDKASKTVQWLLDRSTAGINHLATSMSASMSLSEEDGSVLLDLDNNDHAMAMAADAETNKQQQQEPKKSNNGGAPVLLPDKAXRARARXXAXXRTKXRNR

SEQ ID NO: 1415 - protein, 176 aa, Zea mays
MADAPASPGGGGGSHESGSPRGGGGGGGGSVREQDRFLPIANISRIMKKAIPANGKIAKDAKETVQECVSEFISFITSEASDKCQREKRKTINGDDLLWAMATLGFEDYIEPLKVYLQKYREMEGDSKLTAKSSDGSIKKDALGHVGASSSAAQGGAYNQGMGYMQPQYHNGDISN

SEQ ID NO: 1416 - protein, 284 aa, Arabidopsis thaliana
MMGATVGGDGDTAVVAEQNRQLKGEIATHPMYEQLLAAHVACLRVATPIDQLPIIEAQLSQSHHLLRSYASTAVGYHHDRHELDNFLAQYVMVLCSFKEQLQQHVRVHAVEAVMACREIENNLHSLTGATLGEGSGATMSEDEDDLPMDFSSDNSGVDFSGGHDMTGFGPLLPTESERSLMERVRQELKLELKQGFKSRIEDVREEIMRKRRAGKLPGDTTTVLKNWWQQHCKWPYPTEDDKAKLVEETGLQLKQINNWFINQRKRNWHNNSHSLTSLKSKRKH

SEQ ID NO: 1417 - protein, 400 aa, Zea mays
MDGRESTVASGPNFSSFYTQHRGIGAPGVPGHSAVLHDPPPAGYRQHLDAVSAGYAFQTPQVGGSHIGQGYHHVEASPHVAQYSSGGGTSSGGDMDIGMGSAVCTNVKGELGSGPAQDEQVKKKRGRPRKYKPDGAVTLGLSPSSSLTPHSASLGMGTMVSAPGSGFGSGGSGASGLGAPSEKRGRGRPPGSGKMQQLASLGKWFLGSVGTGFTPHVIIIQPGEDVAARIMAFSQQGPRAVCIISATGAVSAATLHQDSESGSVVTYEGRFEILCLSGSYLVVDEGGGARTRSGGLCIALCGPDNRVIGGSVGGVLMAAGAVQVIVGSFMYGGGSKKNKVKAELDAEPEEANAGDQEVALAEHSSMAPHPAMSGGGGWASGMMRQMESRTPNIDINSIRE

SEQ ID NO: 1418 - protein, 335 aa, Arabidopsis thaliana
MGRPPCCDKIGVKKGPWTPEEDIILVSYIQEHGPGNWRSVPTHTGLRRCSKSCRLRWTNYLRPGIKRGNFTEHEEKMILHLQALLGNRWAAIASYLPERTDNDIKNYWNTHLKKKLKKMNDSCDSTINNGLDNKDFSISNKNTTSHQSSNSSKGQWERRLQTDINMAKQALCDALSIDKPQNPTNFSIPDLGYGPSSSSSSTTTTTTTTTTRNTNPYPSGVYASSAENIARLLQNFMKDTPKTSVPLPVAATEMAITTAASSPSTTEGDGEGIDHSLFSFNSIDEAEEKPKLIDHDINGLITQGSLSLFEKWLFDEQSHDMIINNMSLEGQEVLF

SEQ ID NO: 1419 - protein, 357 aa, Oryza sativa (japonica cultivar-group)
MGRESAAACSPKPKLRRGLWSPEEDEKLFNHISRYGVGCWSSVPKLAGLERCGKSCRLRWINYLRPDLKRGSFSQQEEELIISLHKILGNRWSQIAAQLPGRTDNEIKNFWNSCLKKKLRQRGIDPATHKPLNDGGAGAGEEHHDDGDKQQLMDDVDDCFAIGGGGSSDSLAPPHSPAVSFDPLSVTNVPTTMMQSSSSPYGAAGGEHSSFRSDTLCDYGGSGGGVDVVSDAGTYSAYTGDSSSNSNSTAWTCGSVVVGGAGELPPPPLLPHMDMFGRVDAEPPPYPPFDVQARFSPWHHHHHHHHEPTLPTPPQRLDGGGGAAASFPIRSLSRDMPESCFDLGRGALDDEFGVDFL

SEQ ID NO: 1420 - protein, 195 aa, Triticum turgidum subsp. durum
MTVDRKDAEAAAAAAAPFEIPALQPGRTCGAEESTRSHVLVKPIGSSKLPCNEYALLARQNPKGDALPVPSILRKKRPRRSRDGPNSVSETIRRWKEVNQQLEHDPQGAKRARKPPAKGSKKGCMQGKGGPENTQCGFRGVRQRTWGKWVAEIREPNRVSRLWLGTFPTAEDAARAYDEAARAMYGALARTNFPV

SEQ ID NO: 1421 - protein, 148 aa, Triticum turgidum subsp. durum
MTVDRKDAEAAAAAAAPFEIPALQPGRKKRPRRSRDGPNSVSETIRRWKEVNQQLEHDPQGAKRARKPPAKGSKKGCMQGKGGPENTQCGFRGVRQRTWGKWVAEIREPNRVSRLWLGTFPTAEDAARAYDEAARAMYGALARTNFPV

SEQ ID NO: 1422 - protein, 236 aa, Glycine max
MFQESSATRWPTQPTQWTRYHDKLFERALLVVPEDLPDRWEKIADQVPGKSAVEVREHYEALVHDVFEIDSGRVEVPSYVDDSVATPPSGGAEISTWDNANQISFGSKPKQQGDNERKKGTPWTEEEHRLFLIGLSKFGKGDWRSISRNVVVTRTPTQVASHAQKYFLRQNSVKKERKRSSIHDITTVDSNSVPVPIDQNWVPPPGGSVQQSLQYPSSNMLDQMGTFGYSNYGFGM

SEQ ID NO: 1423 - protein, 215 aa, Solanum tuberosum
MKDKEVKTRMKRGFWKPEEDLILKNCVETHGEGNWATISEKSGLMRSGKSCRLRWKNYLRPNIKRGMMSEDEKDLIIRLHKLLGNRWSLIAGRLPGRTDNEVKNFWNTHLNNKRSCRGKKKHVKSKEANTQSTQGKMQEYPAETVSNQEVATKTVLDSWIEEMQDFNCSLLSPLTMNNMPFLEDEPFIPILDDIVLLEAFTSTGKEAWNEIQPFL

SEQ ID NO: 1424 - protein, 226 aa, Capsella bursa-pastoris
RGKIEIKRIENTTNRQVTFCKRRNGLLKKAYELSVLCDAEVALIVFSSRGRLYEYSNNSVKGTIERYKKAISDNSNTGSVAEINAQYYQQESAKLRQQIISIQNSNRQLMGETIGSMSPKELRNLEGRLERSITRIRSKKNELLFSEIDYMQKREVDLHNDNQILRAKIAENERNNPSISLMPGGSNYEQIMPPPQTQPQQFDSRNYFQVAALQPNNHHYSSAGRQ

SEQ ID NO: 1425 - protein, 268 aa, Glycine max
  misc_feature (50)..(50): Xaa can be any naturally occurring amino acid
MDDGELDFSNHEVFSSPNMGELPSSGSMDSFFDELLKDTHACTHTHTCNXPPGPDFSHTHTCYHVHTKIVPAPEEDQVATDDTAESAEKKSSSKKRPLGNKEAVRKYREKKKARAASLEDEVVKLRALNQHLMKKLQGQAALEAEIARLKCLLVDIRGRIEGEIGSFPYQKTTTTTPNPVAGSYVMNPCNLPCDDRVYCHHPYGKIGESAALNGEEFDGCEFENLQCLASQNLGLKDLRACGVGQARSNVNSSASNKRKGGSHAVTAG

SEQ ID NO: 1426 - protein, 548 aa, Lolium temulentum
MYRVKSESTCEMMHQDQMDSPLADDGGGSSGGSPHRGGGPPLKKGPWTSAEDAILVDYVKKHGEGNWNAVQKNTGLFRCGKSCRLRWANHLRPNLKKGAFTPEEERLIIQLHSKMGNKWARMAAHLPGRTDNEIKNYWNTRIKRCQRAGLPVYPASVINQSANEDQQGSSDFNCGENLSNNHLNGNGLYLPDFTCDNFIANSEALSYAPQLSAVSISNLLGQSFASKRCGFMDQAGMLKQSDSLLPGLSDTVNGALSSVDQFSNDSGKLRQALGFDYLHEANSSSKILAPFGGALTGSHAYLNGTFSASRSTNGPLKMELPSLQDTESDPNSWLKYTVAPTMHPTELVDPYLQSPTATPSAKSECASPRNSGLLEELLHQAEALRSGKNQQPSVRSSSSSVSTPCDTTVVSPDFDLCQEYWEEHSGAMLHEYVPFSGNSLTESTAPVSAASPDAFQLSKISPESNSLGSGEQAMEPTYEPGAGDASPRPENLRPDAFFSGNTADSSLFNNAIAMLLGNDMNTECKPGLFDPSSWSNMPHAFQMSEEFK

SEQ ID NO: 1427 - protein, 224 aa, Camelina sativa
RGKIEIKRIENTTNRQVTFCKRRNGLLKKAYELSVLCDAEVALIVFSSRGRLYEYSNNSVKGTIERYKKAISDNSNTGSVAEINAQYYQQESAKLRQQIISIQNSNRQLMGETLGSMSPKELRNLEGRLERSITRIRSKKNELLFSEIDYVQKRESDLHNDNQLLRAKIAENERNHPSISLMPGGSNYEQLMPPPQTQPFDSRNYFQVAALQPNNHHYSSAGRQ

SEQ ID NO: 1428 - protein, 228 aa, Lepidium squamatum
RGKIEIKRIENTTNRQVTFCKRRNGLLKKAYELSVLCDAEVALVVFSSRGRLYEYSNNSVKGTIERYKKAISDNTNTGSVAEINAQYYQQESAKLRQQIVSIQNSNRQLMGETIGSMSPKELRNLEGRLERSITRIRSKKNELLFAEIDYMQKREVDLHNDNQLLRAKIAENERNNPSISLMPGGSNYEQIMPPPQTQPQPQQFDSRNYFQVAALQPNNHHYSSAGRQ

SEQ ID NO: 1429 - protein, 230 aa, Lepidium squamatum
RGKIEIKRIENTTNRQVTFCKRRNGLLKKAYELSVLCDAEVALVVFSSRGRLYEYSNNSVKGTIERYKKAISDNTNTGSVAEINAQYYQQESAKLRQQIVSIQNSNRQLMGETIGSMSPKELRNLEGRLERSITRIRSKKNELLFAEIDYMQKREVDLHNDNQLLRAKIAENERNNPSISLMPGGSNYEQIMPPPQTQPQPQSQSFDSRNYFQVAALQPNNHHYSSADRQ

SEQ ID NO: 1430 - protein, 630 aa, Zea mays
MKREYQDAGGSGGDMGSSKDKMMAAAAGAGEQEEEDVDELLAALGYKVRSSDMADVAQKLEQLEMAMGMGGVGGAGATADDGFVSHLATDTVHYNPSDLSSWVESMLSELNAPPAPLPPATPAPRLASTSSTVTSGAAAGAGYFDLPPAVDSSSSTYALKPIPSPVAAPSADPSTDSAREPKRMRTGGGSTSSSSSSSSSMDGGRTRSSVVEAAPPATQASAAANGPAVPVVVVDTQEAGIRLVHALLACAEAVQQENFSAAEALVKQIPMLASSQGGAMRKVAAYFGEALARRVYRFRPPPDSSLLDAAFADLLHAHFYESCPYLKFAHFTANQAILEAFAGCRRVHVVDFGIKQGMQWPALLQALALRPGGPPSFRLTGVGPPQPDETDALQQVGWKLAQFAHTIRVDFQYRGLVAATLADLEPFMLQPEGDDTDDEPEVIAVNSVFELHRLLAQPGALEKVLGTVRAVRPRIVTVVEQEANHNSGTFLDRFTESLHYYSTMFDSLEGAGAGSGQSTDASPAAAGGTDQVMSEVYLGRQICNVVACEGAERTERHETLGQWRSRLGGSGFAPVHLGSNAYKQASTLLALFAGGDGYRVEEKDGCLTLGWHTRPLIATSAWRVAAAAAP

SEQ ID NO: 1431 - protein, 226 aa, Lepidium phlebopetalum
RGKIEIKRIENTTNRQVTFCKRRNGLLKKAYELSVLCDAEVALIVFSSRGRLYEYSNNSVKGTIERYKKTKSDNSNTGSVAEINAQYYQQESVKLRQHIVSIQNSNRQLMGETIGSMSAKELKNLEGRLERSIARIRSKKNELLFAEIDYMQKREVDLHNDNQLLRAKIAENERNNPSISLMPGGSNYEQIMPPPQTQTQPFDSRNYFQVAALQPNNHHYSSAGRQ

SEQ ID NO: 1432 - protein, 579 aa, Cucurbita maxima
MKREHHYLHPRPEPPSVATGSNRESYLNTGKAKLWEEEVQLDGGMDELLAVLGYKVKSSDMAEVAQKLEQLEEAMCQVQDTGLSHLAFDTVHYNPSDLSTWVESMLTELHPPPTSHLDDSSFLAPAESSTIANVDYEPQLQTSSRIFEESSSSDYDLKAITDSAIYSPRESKRLKASESDTDVFSTSAIGASNFATRPVVLVDSQENGIQLVHALMVCAEAVQQNNLNLAEALVKRIDYLAVSQAGAMRKVATFFAEALARRIYRLCPENPLDRSVLDMLQMHFYESCPYLKFAHFTANQAILEAFEGKKRVHVIDFSMNQGIQWPALIQALALRPSGPPTFRLTGIGPPAPDNSDYLQDVGWKLVKFAETLHVEFEYRGFVANSLADLDASMLELRPSEVESVVVNSVFELHQLLARPGAIEKVLSVVKQMKPEIVTVVEQEANHNGPVFVERFTESLHYYSTLFDSLECSPNSQDKMMSEMYLGKQICNVVACEGADRVERHETLTQWRTRLSSAGFDPIHLGSNAFKQASILLALFGSGEGYRVEENEGSLMLGWHTRPLIATSAWKPGNNPVVAH

SEQ ID NO: 1433 - protein, 587 aa, Cucurbita maxima
MKREHHHLHPRPDPPSMAAAPNGDTYLNTGKAKLWEEDAQLDGGMDELLAVLGYKVKSSDMAEVAQKLEQLEEAMCQVQDTGLSHLAFDTVHYNPSDLSTWLESMITELHPPPSFPQPHPSQMNDSSFLAPAESSTITSIDYDPQRQTSSLIFEESSSSDYDLKAITSSAIYSPRENKRLKPSSESDSDLFSTSAIGASNSATRPIVLVDSQENGIQLVHALMACAEAVQQNNLNLAEALEKRIGYLAVSQAGAMRKVATFFAEALARRIYRVCPENPLDHSMSDMLQLHFYESSPYLKFAHFTANQAILEAFEGKKRVHVIDFSMNQGMQWPALLQALALRPSGPPAFRLTGIGPPAPDNSDYLQDVGWKLAKLVETINVEFEYRGFVANSLADLDASMLELRPSEVESVVVNSVFELHKLLARPGAIEKVMSVVKQMKPEIMTVVEQEANHNGPVFMDRFTESLHYYSTLFDSLESSPNNQDKMMSEMYLGKQICNVVACEGSDRVEWHETLTQWRTRLCSSGFEPIHLGSNAFKQASMLLALFGSGEGYRVEENNGSLTLGWHTRPLIVTSAWKLGNNSVVVTH

SEQ ID NO: 1434 - protein, 188 aa, Brassica napus
  misc_feature (5)..(6): Xaa can be any naturally occurring amino acid
  misc_feature (19)..(19): Xaa can be any naturally occurring amino acid
VTPAXXESCFKSPLPAKAXSRRYRNGLKAWSLGSSGPSSSSSTSSSSSSSGLSSPWFSGAELLEPDFTSEKPPVPKKYKKRSAESVFSAKLQQQQPQRRCSHCGVQKTPQWRAGPKGAKTLCNACGVRYKSGRLLPEYRPACSPTFSSELHSNHHRKVIEMRRKKEPTDDSSTGLNQPVKTPQAVPSF

SEQ ID NO: 1435 - protein, 141 aa, Triticum aestivum
MGRGRVELKRIENKINRQVTFSKRRNGLLKKAYELSVLCDAEVALIIFSSRGKLYEFGSAGTTKTLERYQHCCYNAQDSNGALSETQSWYQEMSKLKAKFEALQRTQRHLLGEDLGPLSVKELQQLEKQLECSLSLARQLK

SEQ ID NO: 1436 - protein, 146 aa, Elymus repens
KDRHSKICTAGGMRDRRMRLSLDVARRFFALQDKLGFDKASKTVQWLLDRSTAGINHLATSMSASMSLSEEDGSVLLDLDNNDHAMAMAADAETNKQQQQEQTTKSKRRSAPAAPRKKSNNGGAPVLLPDKASRARARQRARERTK

SEQ ID NO: 1437 - protein, 453 aa, Striga asiatica
  misc_feature (429)..(429): Xaa can be any naturally occurring amino acid
  misc_feature (432)..(432): Xaa can be any naturally occurring amino acid
MPDMDGFKLLEHVGLEMDLPVIMMSADDSKNVVMKGVTHGACDYLIKPVRMEALKNIWQHVVRKKKYEWKEKEQEQSGSVEDGERQPKQEDVDYSSSANEGNNWKSSKRRKEDEEGEDKEDTSTLKKPRVVWSVELHQQFVTAVNQLGIDKAVPKKILELMSVPGLSRENVASHLQKYRLYLKRLSGQHQNGLGNSYMGPTDPSFGPLNPLNVNGLDFHTLASSPLPVQSLASIQAASLNRNPTNRFPLSSHIDQRNIFSFENQRINHPNAQIRPVNLLHGVPTSMDSRQLAFTNVNLPITPQLRTQMLTHHQPAFSQAIATTVPGLSGPTNFVDFSRSQRPNFPVSTNTSAAAAAVNNINNNSNNGFSLVGNPGIPSTSSYEVFGNEWGLSGFDGPHHVGPQARINVGPSVLVQPGSSNEQSRVSSFXNRXVFRQLRGPAVAAIIRILFIRS

SEQ ID NO: 1438 - protein, 388 aa, Solanum demissum
MDEVMLPGFRFHPTDEELVGFYLRRKVQQKPISIELIKQLDIYKYDPWDLPKLAAVGEKEWYFYCPRDRKYRNSARPNRVTGAGFWKATGTDRPIYSSEGSKCIGLKKSLVFYKGRAAKGIKTDWMMHEFRLPSITDSTAPKRFLDKHIPPNDSWAICRIFKKANSNAHRALSHSWVSPPQVLPQNNTTSHDFLTSSHFTNNSNEMSSFIHKTSSTSPIQFNDLLQNSSNNNMSSSFTTLDLPLYKTLNSMSNHNNDPITSYTFSSSCVDNMNNIDASSLLLNMSSSIFGDYSIVLPDNMEGGGVHDDTTTTTLKEANNVIINNMEHMEELQWGNVVRSNNIGVLPLMNNFPLNMAVDAWKTNLLWDSSSPCPSSEMSTSYSTNKCYT

SEQ ID NO: 1439 - protein, 228 aa, Eruca sativa
RGKIEIKRIENTTNRQVTFCKRRNGLLKKAYELSVLCDAEVALIVFSSRGRLYEYSNNSVKGTIERYKKAISDNSNTGSVAEINAQYYQQESAKLRQQIISIQNSNRQLMGETIGSMSPKELRNLEGRLDRSVNRIRSKKNELLFAEIDYMQKREVDLHNDNQLLRAKIAENERNNPGMISLMPGGSSNYEQIMPPPQTQPQTFDSRNYFQVAALQPNNHHYSSAGRE

SEQ ID NO: 1440 - protein, 268 aa, Medicago truncatula
MYGNSNFDSDLALLDSIRRHLLGESEFIFGAPTNVSGNTRVFSRSSSFSSLYPCLSDNWGELPLKEDDSEDMVLYGVLRDAVNVGWVPSLEVGSPESVSSVFPLEMTVKPEPDVMPVENVLPVASTAEQVVPEGPKAAPVKGKHYRGVRQRPWGKFAAEIRDPAKNGARVWLGTFETAEDAALAYDRAAYRMRGSRALLNFPLRVNSGEPDPVRIASKRSSPERSSSSESNSPAKRKKVMTAQSGLKTGQVGSQVAQQCTRGGQLLVS

SEQ ID NO: 1441 - protein, 187 aa, Fragaria x ananassa
MRKPCCEKTETTKGAWSIQEDQKLIDYIQKHGEGCWNSLPKAAGLRRCGKSCRLRWINYLRPDLKRGSFGEDEEDLIIRLHKLLGNRWSLIAGRLPGRTDNEVKNYWNSHLKKKILKTGTTLRPNKPHENNHAPNNKLVKLFNKMDDEVVDEVSSADSAAGCLVPELNLDLTLSIKTSTGMADPQVA

SEQ ID NO: 1442 - protein, 231 aa, Eruca sativa
RGKIEIKRIENTTNRQVTFCKRRNGLLKKAYELSVLCDAEVALIVFSSRGRLYEYSNNSVKGTIERYKKAISDNSNTGSVAEINAQYYQQESAKLRQQIISIQNSNRQLMGETIGSMSPKELRNLEGRLDRSVNRIRSKKNELLFAEIDYMQKRSLQEVDLHNDNQLLRAKIAENERNNPGMINLMPGGSSNYEQIMPPPQTQPQTFDSRNYFQVAALQPNNHHYSSAGRE

SEQ ID NO: 1443 - protein, 352 aa, Arabidopsis thaliana
MKNPTLFAPKSPHFFQPILPGFKSHIKIPVKFFSKHIEGKHEGNTVYLRSYPSRRTWKVKMEGHKLTEGWKEFVEAHDLRVGDFVVFKHKGDMLFHVTAIGPSCCEVQYAPSRSHDRNEESDEIGESSRNEKIIEENVKTEPDQFSPDLTCFSQSVTASNLTRDLVGIPRDFAKRYGLNIGRHEIVLMDEEGNTWESEVKSYKSGRVFIAGGWTSLCTANKLEVGDSCTFKLLRNPKIPVFRLCSRPKAGAEARPHKRSRVQSSSGGSRQKHDVRQKLDEEGGPSRCTRSSNKATGDQEKLQQTQSCFIFDHVAKVKQSVEDTLNSIRRFRAKLETKEHNLEALLQETKTKL

SEQ ID NO: 1444 - protein, 226 aa, Guillenia flavescens
RGKIEIKRIENTTNRQVTFCKRRNGLLKKAYELSVLCDAEVALIVFSSRGRLYEYSNNSVKGTIERYKKAISDNSNTGSVAEINAQYYQQESAKLRQNIISIQNSNRQLMGETIGSMSAKELRNLEGRLDRSINRIRSKKNELLFAEIDYMQKREVDLHNDNQLLRAKIAENERNHPSMSLMPGGSNYEQIMPPPQTQSQPFDSRNYFQVAALQPNNHHYSSAGRQ

SEQ ID NO: 1445 - protein, 493 aa, Arabidopsis thaliana
MNNPTLFSPKSPHFFQPLLPGFKSHINIPVKFFSKYIKGKHEGKTVKLRSDSSKRTWKVKIEGHTLTDGWKEFVEAHDLRISDFVIFKHKGDMFFDVTALGSSCWESSRKEKEIEENIETEPDQFSSDLTCFSQSVTTSNLMRDSVGVPRDFAKRYGFNIGRHEIVLMNEEGKPWESEVISYKSGKVIVAGGWKSLCTESKLEVGDSCTFKLLHNAKMPVFRLCSKLPKAGAEARPLKRARVQRWSQESRSKHDVREKIAEEGEPSRRNRTSNKSTGDQGKLQQTQSCFIFDHVAKSLPRNFVRSDGLIKGSNKIVLMNEGARTWTLILKFRDSRRSFYSRGGWRSFCRENGLKPGDSVTFKLESSNTKTPLLLFSIAESKSASTKDRTRFLTLTVTPSSIRSSRLYLSKKFISVNKMERAGGKKITLLDKNGEEWPVTLLMDKRYTRMVLGSGLREFCNAIGVKAYESVVLELVWEETTTLPMFKFCSKIKT

SEQ ID NO: 1446 - protein, 462 aa, Oryza sativa
MSFRSIVRDFRDSFGTLSKRSFEVKISGFSGRHRGKSIGPSSELDDTPVVAQQSKWAGLPPELLRDVMKRLEEDDSNWPSRKDVVACASVCTTWRDMCKDIVRNPEFCGKLTFPVSLKQPGPRDGVIQCFIKRDKSKLTYHLYLCLSSAVLDETGKFLLSAKRSRRTTHTDYIISMDSKNISRSSSGYIGKLRSNFLGTKFIIYDTQPPYNARTLCSQERTSRRFSSRKVSPKVPTGCYPIVQVNYELNVLGTRGPRRMQCAMHSIPASAVEPGGIVPGQPKELLPRLFEESFRSMATSFSKYSITDHSTDFSSSRFSEFGGGALQGQEQEQDGDDVNKERPLVLRNKAPRWHEQLQCWCLNFRGRVTVASVKNFQLIAAAPQPSSGAASEPSQAGQAAQQQTQPSQPSSSSSSSSSNHDTVILQFGKVAKDMFTMDYRYPLSAFQAFAICLTSFDTKLACE

SEQ ID NO: 1447 - protein, 226 aa, Thlaspi arvense
RGKIEIKRIENTTNRQVTFCKRRNGLLKKAYELSVLCDAEVALIVFSSRGRLYEYSNNSVKGTIERYKKAISDNSNTGSVAEINAQYYQQESAKLRQQIISIQNSNRQLMGETIGSMSPKELRNLEGRLDRSITRIRSKKNELLFSEIDYMQKREVDLHNDNQLLRAKIAENERSNPSMNLMPGGSNYEQLMPPPQTQSQPFDSRNYFQVAALQPNNHHYSSAGRQ

SEQ ID NO: 1448 - protein, 298 aa, Fragaria x ananassa
MGDTFEYNYQNNSSCSSSAPASSVSVAQSHSSTDEISLFLQQILVRSSSLTGQQFLFSSSPAGYALPENLGSPSNDSFVGGVIRGVDVSTAVVTASGPNVSSSSVGASENEADEYDCESEEGLEALVEEAAVKSGGRSSSKRSRAAEVHNLSEKRRRSRINEKMKALQNLIPNSNKTDKASMLDEAIEYLKQLQLQVQMLSMRNGMSLHPMCLPGASQFSQIRMDFGGEENRPVHLNMSGILNMNQDPSTQNLYNPNQSLCTRFVKCSQFRRCIWIGSIYSGSLGTLSAPKLIQGNLQ

SEQ ID NO: 1449 - protein, 226 aa, Thlaspi arvense
RGKIEIKRIGNTTNRQVTFCKRRNGLLKKAYELSVLCDAEVALIVFSSRGRLYEYSNNSVKGTIERYKKAISDNSNTGSVAEINAQYYQQESAKLRQQIISIQNSNRQLMGETIGSMSPKELRNLEGRLDRSITRIRSKKNELLFSEIDYMQKREVDLHNDNQLLRAKIAENERSNPSMNLMPGGPNYEQLMPPPQTQSQPFDSRNYFQVAALQPNNHHYSSAGRQ

SEQ ID NO: 1450 - protein, 277 aa, Oryza sativa
  misc_feature (156)..(156): Xaa can be any naturally occurring amino acid
MQEQQPETGRRPAQQFATVDLRRPKGYAAAPATPQPGSAATAAAAAGPAATAAAAAAGEGDPCPRCESRDTKFCYYNNYNTSQPRHFCKCCRRYWTKGGTLRNVPVGGGTRKKSSSSSSSSSSSSAAAAAPAAKRQKTSKKRRVTTPEPLAATTPXVLTEAAADSAAKTTTEATSEKKTTTSTTTTTPPAPDTTSEITTELVVPAVEEDSFTDLLQPDSAAVTLGLDFSDYPSITKSLADPDLHFEWPPPAFDMASYWPAGAGFADPDPTAVFLNLP

SEQ ID NO: 1451 - protein, 695 aa, Zea mays
  misc_feature (319)..(319): Xaa can be any naturally occurring amino acid
  misc_feature (350)..(350): Xaa can be any naturally occurring amino acid
MEMNSSGEETVVKVRKPYTITKQRERWTEAEHKRFLEALKLYGRAWQRIEEHVGTKTAVQIRSHAQKFFTKLEKEAMNNGTSPGQAHDIDIPPPRPKRKPNSPYPRKSCLSSETQTKELPNDKSTKPNMPLSNGHVKMVGDASLQNFQRKELSEKGSRSEVLNLFRDAPSASFSSVNKSSSNHGAPRRTEASKTESRDMSIMENNSFNPNTQEDVKVISDQEMERLNGIQIRSKCEHSHEGYLDISTQQMKLMPKSVETTYVDEQTARASHTLAESNGTASVPVTVPEGTHPDQTSDQVGINGSMNPCIHPMVSADPKXFGSSATPQTFPHNYAAFAPMMQCNCNQDTYXARLAASYWPAAEGNTPIDPNQENPADGVQGRNIGSPPSMASIVAATVAAASVWWATQGLLPFFAPPVAFPFVPAPSAAFPTVDVPRPSEKDRDCPVENAQNECQEARKQVQFEGLRVAASSESDGSGKGEVSLHTELKLSPAQNADATPTTGAGTNDAFRNKKKQDRSSCGSNTPSSSDVDAGNVPEEDNANEKAKQASCSNSSAGDTNHRRFRSNGSTSDSWKEVSEEGRLAFDALFSREKLPQSFSPPQAVDSKEVAKEEEDEVTTVAVDLNKNATSIDHDDLDTMDEPRASFPNELSHLKLKSRRTGFKPYKRCSVEAKENRVPTSDMVGTKRIRLDSEAST

SEQ ID NO: 1452 - protein, 343 aa, Oryza sativa
MKRGCEDELGAGDVILRGVEEVEEEDDDDLVLPGFRFHPTDEELVTFYLRRKIAEKRLSIEIIKEMDIYKHDPSDFLKTSTVGSEKEWYFFCLRGRKYRNSIRPNRVTGSGFWKATGIDRPICSAAGGGGGDCIGLKKSLVYYRGSAGKGTKTDWMMHEFRLPPPPADDLAAGRSSPPPSLQEAEVWTICRIFQRNITHKKQPQPQLAVAAAAVPAPVPDATSSITGSLESDSAGDDVVEYMNTLQPPPASNVNGGYSNQRYFQEQWNSSSNDNTTVFHQHAAAAPPPEPSPATAMAGFGHDQSVLSSPAPSDFYYKDGCNDDIYRMVMELADPSLFYDHIYA

SEQ ID NO: 1453 - protein, 427 aa, Oryza sativa (japonica cultivar-group)
MGSRGDHGGGGGGRGAARATQLKVLVPSSFRKMRICDELAAQLGVGVGGGGAPRAATARVASPLGKAWDVGVVRDGDGRAFLGRGWAEFAAAHGLGVGWFVVLRHGGGVLAVEAFDTTCCLRVFGAPPAEAGRATDTSRKPQFLTVLLPGIMDKMRIPDKFVRDYITGENLNSNMAIILSPLGKSWRVELDKDQSGVFLGGGWLQFLSFHGISRGDVVIFRYEGNLVFKISVFGPNGRQKDFKAKGISIYQGTGEQQEAPSFSRRKCNNKKKSRFGEDDGNQQEMPCSRKGSGNKGRTSDRETKRMRKTRSVYEIGPRSWIKKEINEYVLERCILSLARTFCESIGLVEESSITLMMIDTTSTQGDQGGSSSSSRSWEVTGRRYKDACYLLGAGWRRFCEDNGVRSGDVCVFTVLDTTLWRVDIERC

SEQ ID NO: 1454 - protein, 174 aa, Arabidopsis thaliana
MANESNNLGLEITELRLGLPGDIVVSGESISGKKRASPEVEIDLKCEPAKKSQVVGWPPVCSYRRKNSLERTKSSYVKVSVEGAAFLRKIDLEMYKCYQDLASALQILFGCYINFDDTLKESECVPIYEDKDGDWMLAGDVPWEMFLGSCKRLRIMKRSYVPGFGRTKPRIKLG

SEQ ID NO: 1455 - protein, 330 aa, Arabidopsis thaliana
MGRPPCCEKIEVKKGPWTPEEDIILVSYIQQHGPGNWRSVPANTGLLRCSKSCRLRWTNYLRPGIKRGNFTQPEEKMIIHLQALLGNRWAAIASYLPQRTDNDIKNYWNTHLKKKLVMMKFQNGIINENKTNLATDISSCNNNNNGCNHNKRTTNKGQWEKKLQTDINMAKQALFQALSLDQPSSLIPPDPDSPKPHHHSTTTYASSTDNISKLLQNWTSSSSSKPNTSSVSNNRSSSPGEGGLFDHHSLFSSNSESGSVDEKLNLMSETSMFKGESKPDIDMEATPTTTTTDDQGSLSLIEKWLFDDQGLVQCDDSQEDLIDVSLEELK

SEQ ID NO: 1456 - protein, 248 aa, Rosa hybrid cultivar
MAYENKPNTVLDADAQRRLGRGKIEIKRIENTTNRQVTFCKRRNGLLKKAYELSVLCDAEVALIVFSNRGRLYEYSNNSVRETIERYKKACADSSNNGSVSEATTQYYQQEAAKLRAQITTLQNSNRGYMAEGLSNMSIKELKGVETKLEKAISRIRSKKNELLFAEIEYMQKRELDLHNNNQLLRAKIADNERHQQSINAIAGGHGSYEIMQPTQPFHEARNYFQVNALEPNIHQYSRHDQISLQLV

SEQ ID NO: 1457 - protein, 225 aa, Eruca sativa
GRGKIEIKRIENTTNRQVTFCKRRNGLLKKAYELSVLCDAEVALVVFSSRGRLYEYSNNSVKGTIERYKKAISDNTNTGTVAEINAQYYQQESAKLRQQIISIQNSNRQLMGETIGSMSPKELRNLEGRLDRSINRIRSKKNELLFAEIDYMHKREVDLHSDNQLLRTKIAENERNNPSMNLTPGGYEQIMQPSQTQSQPFDSRNYFQVAALQPNNHHYSSAGRQ

SEQ ID NO: 1458 - protein, 299 aa, Phaseolus vulgaris
MSNISMVEAKLPPGFRFHPRDEELVCDYLMKKLTHNDSLLMIDVDLNKCEPWDIPETACVGGKDWYFYTQRDRKYATGLRTNRATASGYWKATGKDRPILRKGTLVGMRKTLVFYQGRAPKGRKTEWVMHEFRIEGPHGPPKVSSSKEDWVLCRVFYKSREVSAKPSMGSCYEDTGSSSLPALMDSYISFDQTQAHADEFEQVPCFSIFSQNQANPIFNHMTTMEPKLPATTYGGAPNLGYCLDPLSCDRKVLKAVLSQITKMERNPLNQSLKGSTSFGEGSSESYLSEVGMPHMWNNY

SEQ ID NO: 1459 - protein, 281 aa, Zea mays
MLLNPASMLDTIRQHLLEEPPAAADESFGILVADQWSDSLPFRTDDADDMVVFGALQDAFAYGWLPDGSFAHVKPEPVRSPDSSYYSYDGSCFGGLPYPEQPLTPGSEGEAAATPSPRREEAAAAVARGKHYRGVRQRPWGKFAAEIRDPAKNGARVWLGTYDTAEDAALAYDRAAYRMRGSRALLNFPLRIASEIAAAAAGDKRPLALPEPATSSDSSSSSSSTGGSPKRRKRGEAAAANMAMALVPPPSQLSRPAQPWFPAAAPVEQAAMPPRVEQLVI

SEQ ID NO: 1460 - protein, 248 aa, Helianthus annuus
MGRGKVQLRRIENKINRQVTFSKRRGGLLKKAHEISVLCDAEVALIVFSNKGKLFEFSTDSCMDSILERYERYSYTERQLVAADATPRSWTLEYNKLKSRAELLQRNHRHYMGEDIESLSLKEIQNLEQQLDTGLKNIRTRKNQLLHESISELQKKGKAIQEQNTTLTKKIKEKEKDKTIPQNTQWEMHNYVDHDTTFLMPPPPPALNMGGDYNHGGGGSSEGADGRTNELDLSLQPIYSCHMRCFPS

SEQ ID NO: 1461 - protein, 229 aa, Guillenia flavescens
RGKIEIKRIDNTTNRQVTFRKRRNGLLKKAYELSVLCDAEVALIVFSSRGRLYEYSNNSVKGTIERYKKAISDNSNTGSVAEINAQYYQQESAKLRQQIVSIQNSNRQLMGETIGSMIPKDLKTLESKLDKSITRIRSKKNELLFAEIDYMQKRSLQEVDLHNDNQLLRAKIAENERNNPSMNLMPGGSNYEQIMPLPQTQSQPFDSRNYFQVAALQPNNHHYSSAGRH

SEQ ID NO: 1462 - protein, 461 aa, Arabidopsis thaliana
MANASPLSPTNQHFFQPLLPGFQSNLKIPVNYFSEHIEGKHEGKTVTLRTDASERTWEVKMEGHRLTEGWKEFVEAHDLRIGDFVVFRHEGDMVFHVTALGPSCCEIQYPQSSRHEEGEESGENEISEKEGEENVQKESDKSSSDLNCFSQSVTHSNISRDAVSVPRDFVKRSGFSKGRHEIVLMNEEGKSWESEVKSYMSGAVYLVGGWTTFCTENKLDVGDSCTFKLLQKAKTPVFQLCSRTKHLPLSFTKVNGLINPGKIILVDKDRAEWSMMLKVDSRGAVYIIGGNDWKSFCAANEVGAGESLALELIQGGVLLNQITTCFQMEQPSFKAEDGRHKRARVQNRSQETDKGAETSRASTMGPKLEITEKGEPSRASTMRPKVEIREKIAETGEPSRASNKSSGIEGNLQHTKPCSVKTDQLAKVKESVVDTLTSIGRFQAELETMKRKLEDSLQELN

SEQ ID NO: 1463 - protein, 261 aa, Ipomoea nil
MVNSSSAWPPPSSSRLMRKGAWTEEEDNLLRKCIQKYGEGKWHLVPLRAGLNRCRKSCRLRWLNYLRPDIKRGDFSVDEVDLIMRLHRLLGNRWSLIAGRIPGRTANDVKNYWNTHIQKKVFAMARMQDNWKGKAPEIRENTVVRPRPRRFLNTSLSPTSKTGKATAVTYDAQIQGHTLPQPPEAIITTSDLVMENVQLNNTIATLPSELETTTSDDRVRWWEDLLFDKEFNDDEGNACMHEGQVGWTNLPIDMDLLELLS

SEQ ID NO: 1464 - protein, 256 aa, Phaseolus vulgaris
MDATTPSELPPGFRFHPTDEELIVYYLCNQATSKPCPASIIPEVDLYKFDPWELPDKTEFGENEWYFFSPRDRKYPNGVRPNRATVSGYWKATGTDKAIYSGSKLVGVKKSLVFYKGRPPKGDKTDWIMHEYRLAESKQPVNRKIGSMRLDDWVLCRIYKKKNTGKTLEHKETHPKVQMTNLIAANNDEQKMMNLPRTWSLTYLLDMNYLGPILSDGSYCSTFDFQISNANIGIDPFVNSQPVEMANNYVSDSGKY

SEQ ID NO: 1465 - protein, 226 aa, Guillenia flavescens
RGKIEIKRIENTTNRQVTFCKRRNGLLKKAYELSVLCDAEVALIVFSSRGRLYEYSNNSVKGTIERYKKAISDNSNTGSVAEINAQYYQQESAKLRQQIVSIQNSNRQLMGETIGSMIPKDLKTLESKLDKSITRIRSKKNELLFAEIDYMQKREVDLHNDNQLLRAKIAENERNNPSMNLMPGGSNYEQIMPLPQTQSQPFDSRNYFQVAALQPNNHHYSSAGRH

SEQ ID NO: 1466 - protein, 129 aa, Triticum aestivum
  misc_feature (86)..(86): Xaa can be any naturally occurring amino acid
  misc_feature (97)..(97): Xaa can be any naturally occurring amino acid
MGALCDYCGEHRSMVYCRSDAASLCLSCDRNVHSANALSRRHTRTLLCDRCASQPGMVRCLEENTSLCQNCDWNGHSAGSSAAGHXRRNINCYSGCXSSAELSRMWAFILDIPNGAPELNCEQVISLMS

SEQ ID NO: 1467 - protein, 250 aa, Oryza sativa (japonica cultivar-group)
MASILSPLGKFWRIELEKDELGMFFKGGWLQFLSFHGISPGDVVLLRHEGNLVFKIKVFGINGCKKDLKTKDDITIQQSARNQHETPSFSTRKCNKNSRFGEDCKNQLQEIPCSIKGSRKKGRETKRPKKSKSIYEIGPPSWIKKEISNYMLENGNISLPGIFCKSIGLVEETTITLMINSSRGRSSSSSSRSWEVACSVNKNGYGCCNLLPSGWKRFCQANGLLVGDVCTFSVVEATLWHVAIDRVERS

SEQ ID NO: 1468 - protein, 668 aa, Glycine max
QDMSKQPPTQELVAKDLHANEWRFRHIFRGQPRRHLLQSGWSVFVSSKRLVAGDAFIFLRLNGELRVGVRRAMRQQGNVPSSVISSHSMHLGVLATAWHAILTGTMFTVYYKPRTSPAEFIVPYDQYMESLKNNYTIGMRFKMRFEGEEAPEQRFTGTIVGIEDADTKRWPKSKWRSLKVRWDETSNIPRPERVSQWKIEPALAPLALNPLPMPRPKRPRSNVVPSSPDSSVLTREASKVSVDPLPTSGFQRVLQGQELSTLRGNFAESNESDTAEKSGVWPPATDDEKIDVSTSRRYGSDSWMSMGRHEPTYPDLLSGFGAHGDHSSHPSFVDQNGPVANLSRKHLLDREGKHNVLSPWSGVPSSLSLNLLDSNTKGSAQGGDTTYQVRGNLRYSSAFGEYPMLHGHKVEHSHGNFLMPPPPSTPYESPRSRELLPKPISGKPCEVSKPKDSDCKLFGISLLSSPIAPEPSVSQRNVPSEPVGHMHTTSHQQRAFDNDQKSEHSRGGSKPADGLLIDDHEKVLQTSQTHLKDIQAKSHSGSARSCTKVHKKGIALGRSVDLTKFSDYGELIAELDQLFEFGGLLTSPQKDWLIVYTDNEGDMMLVGDDPWQEFVAMVRKIYIYPKEEIQKMSPGTLSSKNEENQSASEGATDTQEIKCQLNNSASDT

SEQ ID NO: 1469 - protein, 127 aa, Medicago truncatula
MNDEGDKTLPIANVGRIMKQNLPPNAKISKESKQLMQECATEFISFVTGEASDKCHKENRKTVNGDDICWALCSLGFDNYAEAIGRYLYKFRQAELIRINQNKLHETAKDKFEEDATNPSTKHSSHR

SEQ ID NO: 1470 - protein, 394 aa, Hordeum vulgare subsp. vulgare
RQGTMQLLKLILTWVQNHHLQKKRPRVGAMDQEAPPAGGQLPSPGANPGYEFPAETGAAAATSWMPYQAFSPTASYGGEAMYPFQQGCSTSSVVVSSQPFSPPAAADMHAGAWPLQYAAFVPAGATSAGTQTYPMPPPGPVPQPFAAPGFAGQFPQRMEPAATREARKKRMARQRRLSCLQQQRSQQLNLSQIQTGGFPQEPSPRAAHSAPVWGGHWSPPAVQAQPHGQLMIQVPNPLSTKSNSSRQKQQKPSPDAAARPPSGGAASQQRQGQAAASDKQRQQGASRTAAAPPAGDKNLRFLLQKVLKQSDVGTLGRIVLPKKEAETHLPELKTGDGISIPIEDIGTSQVWSMRYRFWPNNKSRMYLLENTGDFVRSNELQEGDFIVLYSDVKS

SEQ ID NO: 1471 - protein, 213 aa, Glycine max
MLKMRGKSGLQLQVIQIQQLKIQLKMMTTKKTVPPLVAMTASENPDGYCLIKERMTQALRHFKELTEQNVLAQVWAPVRNGNRYALTTSGQPFVLDPHSNGLHQYRTASLMYMFSVDGENDEILGLPGRVFQHKIPEWTPNVQFYSSKEYQRLNHAQHYNVRGTLALPVFELARQSCVAVVELIMTSQKINYASEVDKICKAFEAVKLRSSEI

SEQ ID NO: 1472 - protein, 306 aa, Arabidopsis thaliana
MIQGEMKTGGGENKNDGGGATAADGVVSWQNARHKAEILSHPLYEQLLSAHVACLRIATPVDQLPRIDAQLAQSQHVVAKYSALGAAAQGLVGDDKELDQFMTHYVLLLCSFKEQLQQHVRVHAMEAVMACWEIEQSLQSLTGVSPGEGMGATMSDDEDEQVESDANMFDGGLDVLGFGPLIPTESERSLMERVRQELKHELKQGYKEKIVDIREEILRKRRAGKLPGDTTSVLKAWWQSHSKWPYPTEEDKARLVQETGLQLKQINNWFINQRKRNWHSNPSSSTVLKNKRKSNAGDNSGRERFA

SEQ ID NO: 1473 - protein, 329 aa, Glycine max
MYHSKNVPSASLIGGNSLSHGQHIDCGGSTMDPGSGGNGLSNNSNLTSKQRLRWTHELHERFVDAVAQLGGPDRATPKGVLRVMGVQGLTIYHVKSHLQKYRLAKYLPDSSSDEGKKADKKETGDMLSNLDGSSGMQITEALKLQMEVQKRLHEQLEVQRQLQLRIEAQGKYLKKIIEEQQRLSGVLSEAPGSGAVAVVPGDACQEPDNKTDPSTPDPEKAAKDRAPAKSLSIESFSSHPEPMTPDSGCHVGSPAESPKGERSAKKQRVTMDGVYSKPEMVLPHQILESSMSSYQQPNTVFLGQEQFDPSLDISTKSDEELVKIGGGNL

SEQ ID NO: 1474 - protein, 443 aa, Gibberella zeae PH-1
MSMIATASPSPHPSSFGMPRPWETNRCPDYSLRPRTENDKVALPSIRQAFPELQLQTQPPHDLNTKPLVTGPPLGTAPLAAASPQYVHSPNSSKRRRLSMEREMESERVRQVPRLCYSPDRESPRQISPNLAIQAGTRENWTAPTRTSPYLTNGATHHSVPMEVGERLEARPALPSLPPPRSLEREAVLVSRGPAPAPVPTPVPTPAPAPASIPASVSASAPAPAPTEGYRSSHQPMSHSRTPIPESGVSPYRESSYGYPYHHPTRYQSLSAGSAHSFDRTPFTPGAYNAPYQDFVRFGEMGPASLSGDNKQRKRRGNLPKETTDKLRAWFVAHLQHPYPTEDEKQDLMRQTGLQMNQISNWFINARRRQLPTMINNARAETDAMSSARGGDMKVLATTERGDFDHGKREPVGPLSDGEGATYEEELEALSQRRPGTMGRGSV

SEQ ID NO: 1475 - protein, 184 aa, Rosa hybrid cultivar
MLKMMEVCQARGFVYGIIPEKGKPVSGASDNIRAWWKEKVKFDKNGPAAIDKYEAEILAMTDADNNRNGNSHTILQDLQDATLGSLLSALMQHCDPPQRKYPLEKAVPPPWWPTGNEDWWMKSGLPCGQSPPYKKPHDLKKMWKVGVLTAVIKHMSPDIAKIRRHVRQSKCLQDKMTAKITSEF

SEQ ID NO: 1476 - protein, 192 aa, Triticum aestivum
  misc_feature (162)..(162): Xaa can be any naturally occurring amino acid
  misc_feature (172)..(172): Xaa can be any naturally occurring amino acid
  misc_feature (184)..(184): Xaa can be any naturally occurring amino acid
MAQHSAGGGGGGGSQHMVQHNAGGGADGGMDIGMGVVAVSGDGKGDQGGEAGQDEQVKKKRGRPRKYKPDGSVTLGLSPSPSTPHSSSPGMGAMVTTPGSGFGPGTGSGGSGSGALTEKRGRGRAPGSGKMQQLASLGKWFLGSVGTGFTPHVIIISAGKDXAARIMSFSQXGPRAICIISAQXAVSTATLH

SEQ ID NO: 1477 - protein, 208 aa, Glycine max
  misc_feature (151)..(151): Xaa can be any naturally occurring amino acid
MLIRGSTPLYSRSSSFGRLYPCLSNDWGELPLMEDDSEDMLLYGVLRDAVNVGWVPSLDASSPESFSSAFMPPVTVKSETDLFPAPEPICNPPVVQGPAPAVVPAKGKHYRGVRQRPWGKFAAEIRDPAKNGARVWLGTFETAEDAALAYXDRAAYRMRGSRALLNFPLRINSGEPEPVRVTAKRASAEPCSSSESGSWVKKRKKVVG

SEQ ID NO: 1478 - protein, 251 aa, Ipomoea nil
MANSSAWSGVRKGAWSEEEDNLLRKCIQEYGEGKWHLIPIRAGLNRCRKSCRLRWLNYLRPDIKRGDFKLDEVDLIMRLHKLLGNRWSLIAGRIPGRTANDVKNYWNTHIQKKVFAMASSMQDNWKGKAPEMRENNVVRPRPRRLFLNTTSSLLSGTPPLTGKATAVTFDAQIQGHNKIPQPEATSELVTKNLQENNTIITASELETTTSNDRVQWWEDFLFDNAGSTCMNQGQVDWPNFPTDMDLSELLS

SEQ ID NO: 1479 - protein, 357 aa, Triticum aestivum
  misc_feature (266)..(266): Xaa can be any naturally occurring amino acid
  misc_feature (304)..(304): Xaa can be any naturally occurring amino acid
  misc_feature (322)..(322): Xaa can be any naturally occurring amino acid
  misc_feature (328)..(328): Xaa can be any naturally occurring amino acid
MELAGAAHPQPPESDVAPPRTPPQAPVEDSCKDTGDTRITEENSCTPPDLNLSQPNNSGLNSSSACENQTSNGDEMTEPESTLEAAKTEGDGSNKEKVLKKPDKILPCPRCNSMDTKFCYYNNYNIHQPRHFCRGCQRYWTAGGSMRNLPVGAGRRKSKSSSTNCNGILIPGDSLSAPGGDASVIPLPIKENQPAVKFGSDSTLPNSMASLLRVEEQNKNSNPASTAHPRNGENQTCPPSATTSDNPRIESVKVAVGVHQNGITGXCNGVTPMPPIPCFPGAPFMYPWNPAWNGVLAMAEPVCXSPSLTRNCSENGHGSNIXWELPPXVPIPGSVAPHSFPVSRLHLPMVFPGLWCG

SEQ ID NO: 1480 - protein, 984 aa, Arabidopsis thaliana
MADQSLLHSPINPHFFQPILTESRTHLNIPVAFFSKHVEGRNNQNKTVTLRSDASDKTWLVKMDGLKLTDGWEDFAFAHDLRTGDIVVFRLEGEMVFHVTALGPSCCEIQYHTSSHNINDDDRNDQINIASRNSSRVKKNPRKKVESSLDHSRFVAKVSAWCLSNDRLYIPLSFARLNGLNKINSKKIYLQNEEGRSWKLVLRHDKSGTQTFVQSGWRRFCSENGIRQGQYTFKLVRKSAPPVIRLCRAKAKPKQRSVAEYSSDHSCFEGSVTPSSLRNDLLYLPRSFVNSNRLDKRCSEIVLKNEQGVKWPLVLKRFKSVTYLPKGWTSFCQVNRIKAGDSFKFKLVGTWKKPVLSLCPTQSNNHKTPLECSEGNKSEESEEDCLEVKKKKYWSRCRASVENMDDDQTNIGNSSRKKRVSKNPREKVESSSDHSSFVGSVNPSSLYKDQLYLPRNFVSSNFLDKRCSEIVLKNERGEKRTLVLKHFKKDLTFLKKGWTSFCQVNRIKAGDSFKFKLVGTWNKPVLSLCPTETNYHKTPLACSEGNKSEESEEEGTEDKNTSQDCLEVKKRKYWSTCRASAENIDDDQTNIGNSSKEKRVKKNPVKKAESSSDHSSFVANVTASSLNYDRLYLPLSFVSSNGLDKMNGKEIVLLNEEGLSWKFNLKYNQAGKHTYVRPGWSRFCDANGMSQGQQFTFKLVQKHGPPVMYLSLSEHRPKSESSSHRSYFVGSVTASSIKKDKLYLWKSFVSSNGLDKGCKKIILKNKWGREWKLVLKHYKSNCFTIIKRGWTSFCQGNGLKAGDSFKFKLVGTGEKPVLSLCPAESSHEKIPLECPEGIDDVNSLSSNPSSGDDSSRSEESEEENMEDKNISQDCLETKKRKYCSSSSYSQNRFVTLTLTRSAFQTYKLVNGINKPRKITLLGQDGVKKVVDLYQESSSRIMRFGKGWREFFDAQGVKIDDSFVLELIWEKEASPVLKFCTKVPK

SEQ ID NO: 1481 - protein, 233 aa, Nicotiana tabacum
MYQPISTELPPTSFSSLMPCLTDTWGDLPLKVDDSEDMVIYGLLSDALTAGWTPFNLTSTEIKAEPREEIEPATIPVPSVAPPAETTTAQAVVPKGRHYRGVRQRPWGKFAAEIRDPAKNGARVWLGTYETAEEAALAYDKAAYRMRGSKALLNFPHRIGLNEPEPVRLTAKRRSPEPASSSISSALENGSPKRRRKAVAAKKAELEVQSRSNAMQVGCQMEQFPVGEQLLVS

SEQ ID NO: 1482 - protein, 957 aa, Ustilago maydis 521
MLLMLLLLLLLLLLLLVLHLRLGLNCTDDVAFSAFVSSTLPLTSANLSHSVWSIRDQFNAQSSTIAYCALPIFAAAASSSSVRPLSFVTLFYFATLVISITAVAFFNLRLSVLRGSPPLRCKLCSASRVPGHSSTQIGWPSTRSTSLLHVPFTLHPSILSTHTGFTATSVFALLTPAHAAVYNLPSPNYFVALTGRDVSITAVESSPSRCIFPAEASSTATSTPRTLHWYRFFTLLIIATRFEQAHRLLDSTCQPIDLTAGVACFGSPLSSSYPASPAASWSARYPSDPSSNIGNPSPRFGSITGACSERPADTSSSEQRLSSPPAASTRSSETSFDRHSVSSLGQRSISTVATLAFSHDIEPLPPITSLGIAKTDLVPPRIGSTKAAAFTMNPSEKADLVARRVSPPSASLRRPASPAGRISNHSAEWDIHSDRGSPRIAGRRSGPPLPAASVPYARGYASSPRDTYREAAYRDPRELSPPTASSGLKRKPSISSDIGARRAPPERVERNGSAWHTTPDYPSRAAAYAEADYYRARGRGETPERTYHSAYSRDAAYATHYADPRMEDPRYSPRHSYPTSPSTSRTAYRSGAHDTAAPGGHPYAPVSRRSDRYSPASLPRSPSYAPRQALPPPQAPPPPHDPYSRSAPHSSYLRRPSPPSYISDTRPVLPPLSSRATAPRYPAAPAAPAHASRSSRYTPPSMDPMAHSDRLSASPEPHGYPEPFYPDRRLYFARERIQDAEMDEYYHGPLGSAGGAGGKVRYGDAYYDAYGPAPGGAYAPAGAHAGGQAGNGGGRMASPGVAPMGAHTGARHAAEARYAGAYSGGEYMQDARDMHAHAGVPRMGRAGGVMPMAAAHVPPGPAAGIAPPPRRRGKLPKPVTDLLKTWLLEHASHPYPTEDEKRSLCSMTGLTLSQVSNWFINARRRILLPAGANGSPATSTAAQVKAAFRDDSNSPEA

SEQ ID NO: 1483 - protein, 174 aa, Triticum aestivum
  misc_feature (28)..(28): Xaa can be any naturally occurring amino acid
MEINSSGEETVIKVRKPYTITKQRERWXTDAEHKRFLEALKLYGRAWQRIEEHVGTKTAVQIRSHAQKFFTKLEKEAINNGTSPGQAHDIDIPPPRPKRKPNCPYPRKGCLSSETPTREVPKSSVSLSNSNAEMASNGTLQLTCIRKLQRKELSENGSCSKVINIFREAPSASF

SEQ ID NO: 1484 - protein, 143 aa, Brassica napus
MADTPSSPAGDGGESGGGSVREQDRYLPIANISRIMKKALPPNGKIGKDAKDTVQECVSEFISFITSEASDKCQKEKRKTVNGEDLLWAMATLGFEDYLEPLKVYLARYRELEGDNKGSGKSGDGSNRDAAAGGVPNEDMPSW

SEQ ID NO: 1485 - protein, 231 aa, Magnolia praecocissima
ENKINRQVTFSKRRNGLLKKAYELSVLCDAEVALIVFSSRGKLYEFGSAGINKTLERYQRCCYTFHDANITDRDTQGWYQEVSKLNAKCDSLQRSQRHLLGEDLGPLSVKELQKLERQLESALTQTRQRKTQIMLEHMEALREKERQLGDINKELKNKLEAKGQGAFRAMQASWESGPLVGNNGFPMHPSQSAAIECEPTLQIGYHSFAAPEANIPRTVVAESNFMHGWIL

SEQ ID NO: 1486 - protein, 223 aa, Zea mays
  misc_feature (35)..(35): Xaa can be any naturally occurring amino acid
  misc_feature (86)..(86): Xaa can be any naturally occurring amino acid
MVQSKKKFRGVRQRHWGSWVSEIRHPLLKRRVWLXTFETAEEAARAYDEAAVLMSGRNAKTNFPVPRSGTGELLAPAVPAARGGAXGGGGGTSLSQILSAKLRRCCKTPSPSLTCLRLDPEKSHIGVWQKRAGARADSSWVMTVELNKDAPPPPSSGEEPAPSYGGAATTSTSTPTSSTITAGSPPPEMMDDEESVALQMIEELLGSHGMMLQVQGAAGSLVI

SEQ ID NO: 1487 - protein, 248 aa, Magnolia praecocissima
  misc_feature (218)..(219): Xaa can be any naturally occurring amino acid
NRQVTFCKRRNGLLKKAYELSVLCDAEVALIIFSSRGKLYGFGSAGTNKTPERYQRCCYTPQDVVVSDRETQGWYQEVSRLKAKYESLQRSQRHLLGEDLGPLSVKELQHLERQLEVALSQARQRKTQIMIEQMEELRKKERQLGDINKQLKIKLEAEGQGPFRCIQGSWESGAMVGNNNFSMNAPQAAPMECEPTLQIGYHHFVPPEANIPRSVLAXXTSSRGGSFEPFKQNKQTDSNNMIGMNFIL

SEQ ID NO: 1488 - protein, 418 aa, Oryza sativa
  misc_feature (51)..(51): Xaa can be any naturally occurring amino acid
RAPAPSRRATTRRRPGACPTRARSSPRCPPPAPGSAASSPTSPTRSPSACXPAFPQSAPPPPPPRGEQRELFRGFYEAGPYLKFAHLAANQAILEAFEGCNSVHVIDFALTDGIQWPSLIQALAVRPGGPPFLRITGIGPHAAGNRDELRDVGLRLAEFARSCSVPFAFRGIAADQLDGLRPWMFQVAPGEAVAINSVLQLHRLLVDQDAAAAASFPAPIDGVLDWVASMNPRVFTVVEQEADHNKSSLLERFTNSLFYYASMFDSLEAISRHGGGDGAGNPLAEAYLQGEIADIVSREGSSRVERHEQMPRWVERLRRGGMTQLPLGATGLWQAAMQLREFSGAGFGVQENGGFLTLTWHSQRLYSASAWRATAGKKMTMMASGAADAMEESQNSNTNGGGGGSSGGGHGALNQIMQ

SEQ ID NO: 1489 - protein, 276 aa, Oryza sativa (japonica cultivar-group)
MQEQQPETGRRPAQQFATVDLRRPKGYAAAPATPQPGSAATAAAAAGPAATAAAAAAGEGDPCPRCESRDTKFCYYNNYNTSQPRHFCKCCRRYWTKGGTLRNVPVGGGTRKKSSSSSSSSSSSSAAAAAPAAKRQKTSKKRRVTTPEPLAATTPVLTEAAADSAAKTTTEATSEKKTTTSTTTTTPPAPDTTSEITTELVVPAVEEDSFTDLLQPDSAAVTLGLDFSDYPSITKSLADPDLHFEWPPPAFDMASYWPAGAGFADPDPTAVFLNLP

SEQ ID NO: 1490 - protein, 204 aa, Magnolia praecocissima
  misc_feature (34)..(35): Xaa can be any naturally occurring amino acid
  misc_feature (85)..(86): Xaa can be any naturally occurring amino acid
MARGKIQMKRIENSVHRQVTFCKRRAGLLKKARXXSVLCDVDIGLMIFSTHGKLYELATKGTMEGLIERYLGTSRGAQIEGGPAXXPPESDQEVFMLKQEIELLQKGLRNSIGGGMGNMTMDELHALERHLELWIYHIRSTKMRIMIQEIQSLKDNEGILKSANEFLQGKIEEQNVIFDMPPMIGGIPYPLTIPNEIFLEELNY

SEQ ID NO: 1491 - protein, 204 aa, Triticum aestivum
MRSSISTKRSRAAAIHNESERKRRDRINQKMQTLQKLVPNSSKTDKASMLDEVIDHLKQLQATVQMMNRMSSMMMPMAMPQLAQMSVMANMAQMAQMAQMGLGMMNMAGPLAQPAYPGLTQPMMHTSTPFVTMQPWNAGAGADRQKQPAAAAVPDAYSAFLACQAAQQNAQQQAQPNGMEAYSRMMAMCQKLSQQQTKPGSSKE

SEQ ID NO: 1492 - protein, 463 aa, Triticum aestivum
  misc_feature (130)..(130): Xaa can be any naturally occurring amino acid
  misc_feature (159)..(159): Xaa can be any naturally occurring amino acid
  misc_feature (169)..(169): Xaa can be any naturally occurring amino acid
  misc_feature (185)..(185): Xaa can be any naturally occurring amino acid
MSFRSIVRDVRESFGSLSRRGFDVRISGLPGLSGHHHRGKSFGPPVEPHGGAVVADQNGWVGLPPELLRDVMKRLEEGESTWPSRKDVVACAAVCSAWREICEDIVQEARSSVGKLTVPVSLKQPGPPRXGLIQCFLKKRHTALTYYLYLCLSPAVLSXENGKFLLAAXKRNRRTTYTEYVISVXDSKDISPSSNGYVGKLASSSRRTNFLVYDTQPPYNAGSLVPCQRGSRRISSRRVSPKVPTGSYPIAQVNYELNVLGTRGPRRMQCTMHSIPASAVDPDGVVPGQPQQLLPGPFDESFRSTNASSRFSMADFSSSRFSSSRFSDVSGGLRREEEDGEAKERPLVLRNKVPRWHEQLQCWCLNFRGRVTVASVKNFQLTAAAPEVTAAAVPPSEPSQPPQQQQLQPSSSSSSSTSDHEKVILQFGKVTKDMFTMDYRYPLSAFQAFAICLTSFDTKLACE

SEQ ID NO: 1493 - protein, 323 aa, Malus x domestica
MVSKNPNPPEGLYLDPNESGMPLPGLGPFASATATTSTTSSSAEDLSKKIRKPYTITKSRESWSEPEHDKFLEALQLFDRDWKKIEAFIGSKTVIQIRSHAQKYFLKVQKNGTSEHLPPPRPKRKAAHPYPQKASKNALALPPVSWSCQSSSALLESGFNQRPDSSSMLMSPIPGPVAPSWPNGSVQTANPSHESKVVSGPTVLNNSCSTTESTPKAQPVGGTTDQVNHSHALRVLPDFTQVYGFIGSVFDPNVTGHLQNLKKMDPIDVETVLLLMRNLSMNLTNPEFEDHRQLLSSYKMDANTGNLSDATKTLCDDQHEKVP

SEQ ID NO: 1494 - protein, 232 aa, Lilium longiflorum
MGRGKIEIKRIENTTNRQVTFCKRRNGLLKKAYELSVLCDAEVALIVFSSRGRVYEYSNNSIKQTIDRYKKACDSSNSNSLIQVNSQQYFQQESAKLRHQIQILTNANRHLVGEALSSLTVKELKQLENRLERGLTRIRSKKHELLFAEIEFSQKREVELQSDNMYLRAKIAENERTQAAIVQARAEFDALPTFDSRNFYQVNNMLEAPPHYHHQDQTALHLGYEAKDDSVP

SEQ ID NO: 1495 - protein, 244 aa, Vitis vinifera
MGRGRVELKRIENKINRQVTFSKRRNGLLKKAYELSVLCDAEVALIIFSSRGKLYEFGSAGTTKTLERYQRVCYTPQDNNMECETQSWYQEVSKLKAKYESLQRTQRHLLGEDLGPLSVKELQNLEKQLEGALAQARQRKTQMMIEQMEDLRRKERQLGDLNKQLKLKLEAEGQSLKAIQGSWNPSTATAGNSSFPVHPSQSNPMDCEPEPILQIGYHHYVPAEGPSVSKSMAGESNFIQGWVL

SEQ ID NO: 1496 - protein, 307 aa, Oryza sativa (japonica cultivar-group)
MYQPNPISSSGQTHGNPTAHEQMELGNNAIVPSNGGNNNPNMAARQRLRWTNELHDRFVEAVTQLGGPDRATPKGVLRIMGVPGLTIYHVKSHLQKYRLAKYIPDPSADDNKDEDKDPGNLLSALEGSSGMQISEALKLQMEVQKRLHEQLEVQRQLQLRIEAQGKYLQKIIEEQQRVIGAGASRATSSEQLPDSEKTNPPTPVPISESPVQGAPHSKNSQSQVEPTKSPSHDDALPCGEPLTPDSSCRPGSPTLSPKHERAAKRQRGSDAGDVTAFADGEFVLPPGIFESSTGSEFQECSMPYSGH

SEQ ID NO: 1497 - protein, 378 aa, Arabidopsis thaliana
MDGREAMAFPGSHSQFYLQRGVFTNLTPSQVASGLHAPPPPPGMRPMSNPNIHHPQASNPGPPFSMAEHRHSDFGHSIHMGMASPAAVQPTLQLPPPPSEQPMVKKKRGRPRKYVPDGQVSLGLSPMPCVSKKSKDSSSMSDPNAPKRARGRPPGTGRKQRLANLGEWMNTSAGLAFAPHVISVGSGEDIVSKVLSFSQKRPRALCIMSGTGTVSSVTLREPASTTPSLTFEGRFEILSLGGSYLVNEEGGSKSRTGGLSVSLSGPEGHVIGGGIGMLIAASLVQVVACSFVYGASAKSNNNNNKTIKQEIKPKQEPTNSEMETTPGSAPEAAASTGQHTPQNFPAQGMSGWPVSGSGSGRSLDSSRNPLTDIDLTRG

SEQ ID NO: 1498 - protein, 750 aa, Glycine max
MDAYSSGEEVVVKTRKPYTITKQRERWTEEEHNRFLEALKLHGRAWQRIEEHIGTKTAVQIRSHAQKFFTKLEKEALVKGVPIGQALDIDIPPPRPKRKPNNPYPRKTRIGTTSLHSGAKDGKLNLVESSHVNQALDLKKEPLPEKHDLDEGLTTVKENKDENHAKVFTLLQEVPCSSVSSANESSITMSVPLGNPCAFKEITPSVKEVIARDEKTESFVTVEPENGKLEINDGKQTNGTSKDSRLEDSDALHMKLVQNEKPDGLDCELTIDGMQGNQNYPRHVTVHVVDGNLGTNTQNPSQDMLFRDSMFQPIGGVNGQRNVFTNTAPSNTSESQNNTARSSVHQSFLPYPPFTQHNQDDYQSFLHMSSTFSNLIVSTLMQNPAAHAAASFAATFWPYANPETSANSPRCSQGGFTNRQIGSPPCVAAIAAATVAAATAWWAAHGLLPLCAPLHTSFACPASVTTVPSMNTGEAPALKAEQEKTTLQNPPLQDQMLDPEYSEAQQAQHSASKSPAAILSDSESGDAKLNTSSKVTDHETNKTISEHLDSNKTKGRKPVDRSSCGSNTASSSDVETDALEKGEKGKEEPEIPDANQLAIEFSNRRRSVSNLTDSWKEVSEEGRLAFQALFSREVLPQSFSPPHALKNTDHQMDNANDNKQNIDDKDEDLDGSKKCSSNYEAMQKNLLFVENNEGLLTIGLGQGKLKTHRTGFKPYKRCSMEAKENRVGASSNQGEEQGCKRIRLEGETST

SEQ ID NO: 1499 - protein, 202 aa, Brassica napus
MTRRCSHCNQNGHNSRTCPNRGVKLFGVRLTEGSIRKSASMGNLSHHSGSGLSGLVSGSPGDGPDHDGYASEDFVPGSSSSRERKKGNPWREEEHRMFLLGLQKLGKGDWRGISRNYVKTRTPTQVASHAQKYFIRQSNVSRRKRRSSLFDIVPDEIMDSQEMEAEDIPMQGSDSVPAPLTLETEECESMKSTNSSGDEPPT

SEQ ID NO: 1500 - protein, 240 aa, Zea mays
MQEASSAAAAGAEPGRRAAQHQFAGVDLRRPKGYAPPAPAPAVGEGDPCPRCASRDTKFCYYNNYNTSQPRHFCKGCRRYWTKGGTLRNVPVGGGTRKKPSSSSSSSYAAAAAADRQPKKKPASKKRRVVAPAPELAAAADPGKTATTTTTTTTTSEITTETGALEDSDSLAHLLLQPGTEDAEAVALGLGLSDFPSAGKAVLDDEDSFVWPAASFDMGACWAGAGFADPDPACIFLNLP

SEQ ID NO: 1501 - protein, 617 aa, Magnetospirillum magnetotacticum MS-1
MTARDEVLAAFDAGATDVIHKPFDPRELVSRVSVHTANALMSRAMRLDNTRMVNELAEAALLMTSVLPRTETLKAIRTAAGIAFDWFSRPCSAVGGDLWQAWLLGGGKVALFFGDVSGHGIGAALRAFSTHSVLSPLPSFADDPLKMAALLDCRLVSVDRDHHHFVAGVYGVFDRVEGCFSYVAAGLRNAVLLRADGRREALKLSGLPFGLTEDAGRQLGRVAIGKGDRLLIYSDALVEQAAEGSMTETALAGWIEEQVARAGETGEAEVARHLGKTFLASNPDCADDLLLVSATFPDYPVLVNGRPLHPFTGPAELLPGHGASLLVVDDMPMNRKLLDTMLKAEGYAIAEAEDGLVALERLQAEPERFDAILLDRQMPRMDGMTLLRHLKSDIRLAQIPVIMQTAFGSSEDIAEGIQAGVFYYLVKPLQLQILSSVVKAAVADHRRAQKLRTDLRRQSGTLALLEQGEFAFRTLAEADWLAVALASLCPWAPDVVTGLSELMVNAIEHGNLEISYQEKTEFLTSGRLIEEIEARLARPDLGDRRASIAVSREPQGLRFTVRDQGPGFDWRPYMDISPERAFHSHGRGIAIARRLSFDTLAYHEPGNVVEVAVAMPS

SEQ ID NO: 1502 - protein, 283 aa, Zea mays
MIRGGNHQQAADVEEELARNSRHAAAVATSRQWSAQTESRIVRVSRVFGGKDRHSKVKTVKGLRDRRVRLSVPTAIQLYDLQDRLGLNQPSKVVDWLLNAARHEIDKLPPLQFPPQDLMVGHLTPHNMPLMVHDEKFGHLAAAAALASGGGGGAKVSQQGNVVDVDGTGAHHLVGRFPGGYHRFMELNSALGMVSGAMAPPYNNNYTGEAWNNSGGGVHDSGSPQIVAAAAHHSPFPSLLSLAPRPHQLAFYSSEADQQFQVENLGSQSLSLSSARAYHDQAS

SEQ ID NO: 1503 - protein, 75 aa, Oryza sativa (japonica cultivar-group)
MASEWSKEENKLFEQAIAYYGEGAPDLWHKVSRAMGGTKTADEVRLHFEILVDDIKLIEARRVPFPKYNTQGAWN

SEQ ID NO: 1504 - protein, 246 aa, Triticum aestivum
  misc_feature (7)..(7): Xaa can be any naturally occurring amino acid
  misc_feature (14)..(14): Xaa can be any naturally occurring amino acid
  misc_feature (20)..(22): Xaa can be any naturally occurring amino acid
  misc_feature (111)..(111): Xaa can be any naturally occurring amino acid
WKLAQFXAYTIRVXDFQYRXXXAATLADLEPFMLQPEDSNEEPEVIAVNSVFEMHRLLAQPGALEKVLGTVRAVRPRIVTVVEQEANHNSGTFLDRFTEHYYYSTMFDSWXSLHYYSTMFDSLEGGSSGGGPSEVSSGAAAAPAAAGTDQVMSEVYLGRQICNVVACEGAERTERHETLGQWRNRLGNAGFETVHLGSNAYKQASTLLALFAGGDGYKVEEKEGCLTLGWHTRPLIATSAWRLAAP

SEQ ID NO: 1505 - protein, 281 aa, Glycine max
MQEPSLGLMGEVSGDHHRQLKAEITTHPLYEQLLAAHVACLRVATPIDQLPLIDAQLSQSHHLLRSYVSHNTHSLSPHHRQELDNFLAQYLIVLCTFKEQLQQHVRVHAVEAVMACRDIENALQALTGVSLGEGTGATMSDDEDDLQMDISLDQSSAEGHDMMGFGPLLPTESERSLMERVRQELKIELKQGFKSRIEDVREEILRKRRAGKLPGDTTSVLKNWWQQHAKWPYPTEDDKAKLVEETGLQLKQINNWFINQRKRNWHSNSQSVTSLKSKRKR

SEQ ID NO: 1506 - protein, 236 aa, Triticum aestivum
ADGSNDENPGAVEEEKAEPAKDYIHVRARRGQATDSHSLAERVRREKIGERMKLLQSLVPSCNKITGKALMLDEIINYVQSLQRQVEFLSMKLSTMNPQLELDEQHIPSKEMNQMAVPGFSYAGSPVAVAAGHGHGAELEGTFSWEHDLQEAWCRWGEPAAAIGRTPKLSTASEILPITFPWLLHVLKTAGSRFCAEVALSGPFHVIECRQWPAGDYSNHMKVEPKKKKKKKKKKK

SEQ ID NO: 1507 - protein, 347 aa, Medicago truncatula
MSSKSLGRKLKGIKNGIGSIWSKHMFCRSNSHVALDVTPIEPIQQGQWASLPPELLLDIIRRVEKSETFWPARAVVIFCASVCKSWRSATLEIVKTPQQCGRITFPISVKQEEQKNVYIPVVLRLGAMSNFWCTKFSIYDSQPPDNAAVQSNCRPSGILNSKQVSPRRAPACSHLVGTVSYEVVITTDTPRKINCIMNSIPTSALYEGGNTPTPTSLPPIFDIPFSCSPALKEKSPMKGSYHGSLSELPELSQSSIEPLTLINISRSYFDQLIQCRGRCSARVISIKNFQLGASVHLPHNVSRAELKRVILQFAKIEKDLFIMDYSYPLSAFQAFAICLTSMRAMHL

SEQ ID NO: 1508 - protein, 116 aa, Glycine max
  misc_feature (85)..(85): Xaa can be any naturally occurring amino acid
MGYICDFCGDQRSMVYCRSDAACLCLSCDRNVHSANALSKRHSRTLLCERCNSQPAFVRCVEEKISLCQNCDWLGHGTSTSSSHXKRQAINCYSGCPSAAELSSIWSFCVRNRCHK

SEQ ID NO: 1509 - protein, 231 aa, Sorghum bicolor
MGRGRVELKRIENKINRQVTFAKRRNGLLKKAYELSVLCDAEVALIIFSNRGKLYEFCSGQSITKTLERYEKHMRPDTAVQNKENELVQSSRNEYLKLKARVDNLQRTQRNLLGEDLGSLGIKELEQLEKQLDSSLRHIRSTRTQHMLDQLTDLQRREQMLCEANKCLRRKLEETSNQVHSKCGARCQLTRLRAATPPHSRPHHILAMDCSFIPWKLQQSQPCRSGSLLNI

SEQ ID NO: 1510 - protein, 253 aa, Rumex acetosa
MEFSNELSRDMEDGSPQRKMGRGKIEIKRIENVTNRQVTFCKRRNGLLKKAYELSVLCDAEVALIVFSSRGRLYEYANHSVKATIERYKKTCSDSTGVTSVEEANAQQEAAKLRNQIRTLQNQTRNTSRNLMGEGLTSMNMKDLKNLETRLEKGISRVRAKKNELLFGEIEFMQKKEIELHNNNQFLRAKIAESERSQQSMNLMPGSSSGEQHYELMPQSQAGPFDSRNFFQVSDLQPDERYSCQNQTPLQLV

SEQ ID NO: 1511 - protein, 97 aa, Triticum aestivum
MISAGDHGNDRRKFEPAAAGNKALQAAAAASRHWSASTESRIVRVSRVFGGKDRHSKVRTVKGLRDRRVRLSVPTAIQLYDLQDRLGLSQPSKVVDW

SEQ ID NO: 1512 - protein, 312 aa, Zea mays
MYSPKPESSFGPNPNSGTHQQQMELTGANMGPGNGANNNTNMAGRQRLRWTNELHERFVEAVTQLGGPDRATPKGVLRIMGVQGLTIYHVKSHLQKYRLAKYIPDASTDGNKTDNKDPGDLLAGLEGSSGLQISEALKLQMEVQKRLHEQLEVQRQLQLRIEAQGKYLQKIIEEQQRLTGVKSETPAGGASVTVSSDQFPDSERTEPSTPAPASESPTQVGASNRDTGDRTEATKSTCHGDSLSRNEPLTPDSNCQNGSPVASPNHERAAKRQRGSGTEFLDSEAEFSLPRHIFESSSGSEFQQYSMSYSGQ

SEQ ID NO: 1513 - protein, 262 aa, Sorghum bicolor
MELGDATAGQGAQGDAASGALVRKKRMRRKSTGPDSIAETIKRWKEQNQKLQDESGSRKAPAKGSKKGCMTGKGGPENVNSMYRGVRQRTWGKWVAEIREPNRGRRLWLGSFPNAVEAAHAYDEAAKAMYGPKARVNFSDNSADANSGCTSALSLLASSVPVATLQRSDEKVETEVESVETEVHEVKTEGNDDLGSVHVACKTVDVIQSEKSVLHKAGEVSYDYFNVEEVVEMIIIELNADKKIEAHEEYHDGDDGFSLFAY

SEQ ID NO: 1514 - protein, 359 aa, Brassica oleracea
MTRRCSHCNQNGHNSRTCPNRGVKLFGVRLTEGSIRKSASMGNLSHYSGSGLSGLGGTGSNNPGSPGDGHDHGVGDGYASEDFVPGSSSSRERKKGNPWTEEEHRMFLMGLQKLGKGDWRGISRSYVTTRTPTQVASHAQKYFIRQSNVSRRKRRSSLFDMIPDELTDVMVDSQEQQAEDVPMETQMQSTDSVPAPLILETEECESMKSTNSSAEEPPTVTASSSSFTPEDTIQTQLQVQQPPGSFPVLYPTYFSPFYSFPFPVWPAAYVTEPAKEETHEILRPTAVHSKAAPINVDQLLGMSKLSLGESSQNGVSEQSLSLKLVGGSSSRQSAFHPNPASGGGGSDMNTVIHAVQKSA

SEQ ID NO: 1515 - protein, 253 aa, Gnetum gnemon
MGRGRVQLRRIENKINRQVTFSKRRNGLLKKAYELSVLCDAEVALIIFSTRGKLYEFASSSMSKTLERYEKCSYSMQENASTDRDAQNWHHEVTKLKAKLESLHKAQRSLMGEDLGPLNIKELQSLEQQLEVALGHVRNRKTQLLIQTIDELRDKERTLQEVNKSLQKKLSETEGRNVIPALPHAPNGSGEWESSTLTTTTYALQTQQTSNIHHVDCEPTLHIGPYHQAVHHEAITAPPATHSEPHNQYIWWV

SEQ ID NO: 1516 - protein, 362 aa, Helianthus tuberosus
MESGGDGGGTSSCLMSFGDTNNNINNSSSNNNNSNNNIGSLCLPPNPPGAYNTTTNNNNLIFSDHHPSAMMLEDNNININDGVGLAFMNPSSSVKAKIMSHPHYPRLLSAYLNCQKIGAPPEVVERLEEACRASVVAAMSSRSGGAGTSDGSGGGMNMIIGQDPALDQFMEAYCEMLIKYEQELSKPFKEAMLFLSRMESQFKAITFSNSDSGCGEGGMDRNGSSEEELDVDMNNGMVDPQAEDRELKGQLLRKYSGYLGSLKQEFMKKRKKGKLPKEARQQLLDWWTRHYKWPYPSEAQKLALAESTGLDQKQINNWFINQRKRHWKPSEDMQFVVMDAAHPHYFIDNIFGNPYPMDVSLL

SEQ ID NO: 1517 - protein, 676 aa, Hordeum vulgare subsp. vulgare
MFPLGARQPPPSAMDNQQQQQPPRGEHAAQPRCWEEFLHRKTIRVLLVETDDSTRQVVAALLRHCMYQVIPVENGHQAWAYLQDMQSNIDLVLTEVFMHGGLSGIDLLGRIMNHEVCKDIPVIMMSSHDSMGTVLSCLSNGAADFLAKPIRKNELKNLWAHVWRRSHSSSGSGSGSAIQTQKCTKSKSGDDSNNNSNDRNDDASMGLNARDGSDNGSGTQAQSSWTKRAVEIDSPQDMSPDQSADPPEGTCAHVNHPKSEICSNRWLPGTNNKKCQKPKETTNGDGFKGKELEIGAPGNLNTDDQSSPNESSVKPTDGRCEYLPQNNSSDTVMENLEEPIVRAADLIGSMAKNMDAQQAAARAIDAPNCSLQASEGKDTDGENAMPYLELSLKRSRSTGEGAGPIQEEQRNVVRRSDLSAFTRYNMCAVSNQGGAGFVGSCSPNGDSSEAAKTVAAQMKQGSNGSSNNNDMGSTTKSVVTKPCGNNKVSPINGNTHTSAFHRVQPWTPATAAGKDKADEVSKKNVAAAAAAAKEMGCEAQSKHPCAAADDVNGGSAGGTAQSSVVNPSGPVEGHTANYGSNSFSNNNTNNGSTAATTAAAAAVHAETGGGVDKRSNMMNMKRERRVAAVNKFREKRKERNFGKKVRYQSRKRLAEQRPRVRWQFVRQPPAPATVER

SEQ ID NO: 1518 - protein, 158 aa, Triticum aestivum
LSHDSSGFEFFIIMLSNSLKKLRMPDKFAKVLAGREPREVKLREAGSGRRSLWDVKVVLDADGHTYLGRGWERFARAHDLRLGYFLVFSYDGDAVLTVKVFDVSMCRRHYKHHDDDDASSGSSSDSGGSSSAEVEVDDAPTSQFTNVPLEFHEAHGYA

SEQ ID NO: 1519 - protein, 166 aa, Brassica rapa subsp. pekinensis
HFTANQAILEAFEGKKRVHVIDFSMNQGLQWPALMQALALREGGPPVFRLTGIGPPAADNSDHLHEVGCKLAQLAEAIHVEFEYRGFVANSLADLDASMLELRPSEIEAVAVNSVFELHKLLGRTGGIEKVLGVVKQIKPVIFTVVEQESSHNGPVFLDRFTESLH

SEQ ID NO: 1520 - protein, 219 aa, Oryza sativa
LITSTSLPPQPRAHSSLSRRERALSLAATTRNPSPSSRTSAMARPQQRYRGVRQRHWGSWVSEIRHPLLKTRIWLGTFETAEDAARAYDEAARIMCGPRVRTNFPHDVADEAAPPPPPHSAAAASSSFLSAALVAKLHRFNLASVQAAQRGNSNDDDSTTSSSAAASSRAVIPSLPAAAGALGNAAATAEWSGGFLEEQYVDQMIEELLDSNFSMEISC

SEQ ID NO: 1521 - protein, 126 aa, Acidobacteria bacterium Ellin345
MDAIRALIIDDSSVMRKIVERSLRQAGVALSQVMEAGNGAEALNLLRSNPVDLILSDINMPVMDGLEFVRRLKAEGLAANAPVVMITTEGSESQVVQAVSSGARGYIRKPFTADQVKEHVIAILNK

SEQ ID NO: 1522 - protein, 203 aa, Triticum aestivum
DEPPRDYVHVRARRGQATDSHSLAERVRREKITLKMKMLQDLVPGCNKVIGKALMLDEIINYVQSLQQQVEFLSMKLSTVNPQLDFDTLSNLLHKDMNQALGPSASTVFPLESAGTVYPLCDQADLYQSFSSGAMENQCSMGLLDMALPPAPQYPFQKQQQDFWEASAQNGLHMDHEQSQENAGSAPNFDGQLQAADHPEIEF

SEQ ID NO: 1523 - protein, 308 aa, Glycine max
MECVEAALKSNYRKEMTLKLSPQTFTEEVSVQNGTTCDDFFVNDLLDFSHVEEEPEQQEDTPCVSLQHENPSHEPCTFKDDYASVPTSELSVLADDLADLEWLSHFVEDSFSEFSAAFPTVTENPTACLKEAEPEPEIPVFSFKTPVQTKARSKRTRNGLRVWPFGSPSFTDSSSSSTTSSSSSSSPSSPLLIYTQSLDHLCSEPNTKKMKKKPSSDTLAPRRCSHCGVQKTPQWRTGPLGPKTLCNACGVRFKSGRLLPEYRPACSPTFSSELHSNHHRKVLEMRQKKETVSVDETGFAPAHVVPSF

SEQ ID NO: 1524 - protein, 333 aa, Arabidopsis thaliana
MGRPPCCDKIGVKKGPWTPEEDIILVSYIQEHGPGNWRSVPTHTGLRRCSKSCRLRWTNYLRPGIKRGNFTEHEEKMILHLQALLGNRWAAIASYLPERTDNDIKNYWNTHLKKKLKKMNDSCDSTINNGLDNKDFSISNKNTTSHQSSNSSKGQWERRLQTDINMAKQALCDALSIDKPQNPTNFSIPDLGYGPSSSSSSTTTTTTTTRNTNPYPSGVYASSAENIARLLQNFMKDTPKTSVPLPVAATEMAITTAASSPSTTEGDGEGIDHSLFSFNSIDEAEEKPKLIDHDINGLITQGSLSLFEKWLFDEQSHDMIINNMSLEGQEVLF

SEQ ID NO: 1525 - protein, 523 aa, Arabidopsis thaliana
  misc_feature (106)..(106): Xaa can be any naturally occurring amino acid
  misc_feature (443)..(443): Xaa can be any naturally occurring amino acid
MEKSGFSPVGLRVLVVDDDPTWLKILEKMLKKCSYEVTTCGLAREALRLLRERKDGYDIVISDVNMPDMDGFKLLEHVGLELDLPVIMMSVDGETSRVMKGVQHGXACDYLLKPIRMKELKIIWQHVLRKKLQEVRDIEGCGYEGGADWITRYDEAHFLGGGEDVSFGKKRKDFDFEKKLLQDESDPSSSSSKKARVVWSFELHHKFVNAVNQIGCDHKAGPKKILDLMNVPWLTRENVASHLQKYRLYLSRLEKGKELKCYSGGVKNADSSPKDVEVNSGYQSPGRSSYVFSGGNSLIQKATEIDPKPLASASLSDPNTDVIMPPKTKKTRIGFDPPISSSAFDSLLPWNDVPEVLESKPVLYENSFLQQQPLPSQSSYVAISAPSLMEEEMKPPYETPAGGSSVNADEFLMPQDKIPTVTLQDLDPSAMKLQEFNTEGDSXRSLNWELPESHHSVSLDTDLDLTWLQGERFLANTGLQFQDYSSSPSLLSELPAHLNWYGNERLPDPDEYSFMVDQGLFIS

SEQ ID NO: 1526 - protein, 240 aa, Asparagus officinalis
MDQPDLSQVGPVGLTQLSPLQIQQIQAQIQLNHQHQLMVSRTLQARNYHNTLGVKPQPMKLQASVAAPQSKPTKLYRGVRQRHWGKWVAEIRLPKNRTRLWLGTFDTAEEAALAYDKAAYKLRGDYARLNFPNLKHTHLAGNPLHSSVDAKLEAICQTLESPGKKKVSTGSKPEPVVSSPTVETEEESSSSSSVTGATNSPVSEIESLDFNEVPWDETEDFVLRKYPSYEIDWDSILSSA

SEQ ID NO: 1527 - protein, 254 aa, Brassica rapa subsp. pekinensis
MGRGRVEMKRIENKINRQVTFSKRRAGLLKKAHEISILCDAEVSLIVFSHKGKLFEYSSESCMEKVLERYERYSYAEKQLKAPDSHVNAQTNWSMEYSRLKAKIELLERNQRHYLGEDLESISIKELQNLEQQLDTSLKHIRSRKNQLMHESLNHLQRKEKEILEENSMLTKQIKERESILRTHQNQSEQQNRSHHVAPQPQPQLNPYMISHQASPFLSMGGMYQGEDPTAVRRNRLDLTLEPIYNCNLGYFAA

SEQ ID NO: 1528 - protein, 330 aa, Broussonetia papyrifera
MKALEPFMKSAHNNINNNISPISSSSSSSYLSSEPNFYPESETCSPSTTQMFSSGLFSSFNHMGSEQTGSLGLNQLTQSQILQIQAQIYFQQQQQQQQNLLMTTITPPQNSLNYLGPRAVPMKNVGANSKPNKLYRGVRQRHWGKWVAEIRLPKNRTRLWLGTFDTAEEAALAYDKAAYKLRGDFARLNFPHLRHEGAHVSGEFGEYKPLHSSVDAKLQAICQSLANSQKQGSAKEACSEPEVKPVIEPKMASDNSPKGELEVSSSSLSSSSSLSLSLSLSSPLSDESSAGSSSPESDVTLLDFSDSHWDGNENFGLGKYPSVEIDWDAL

SEQ ID NO: 1529 - protein, 435 aa, Glycine max
STADDSYELKNKLRELEISLLGPDSDIVDSCHCSYKGGCHGASPMAKYNWDQIVEMIPKLNLKEVLIRCAQAVADDDIETAVGFMNNVLAKMVSVGGDPIQRLGAYMLEGLRARLESSGSIIYKALKCEQPTSNDLMTYMHILYQICPYWKFAYTSANAVIGEAMLNESRIRIIDFQIAHSSRWLLLIQALASRPGGPPFVHVTGVDDSQSFHARGGGLHIVGKRLSDYAKSCGVPFEFHSAAMCGSEVELENLVIQPGEALVVNFPFVLHHMPDESVSTENHRDRLLRLVKSLSPKVVTLVEQESNTNTSPFFQRFAETLSYYTAMFESIDVALPRDDKQRINAEQHCVARDIVNMVACEGDERVERHELLGKWRSRFSMAGFAPCPLSSLVTDAVRNMLNEFNENYRLGYRDGALYLGWKNRAMCTSSAWRCY

SEQ ID NO: 1530 - protein, 647 aa, Zea mays
MMGGGLMMDQSVVFPGVHNFVDLLQQNGDKNLGFASLMPQTSSGDQCVMGEGDLVDPPPDSFPDAVEDDSDDDVEDIEELERRMWRDRMKLKRLRELQQSRGKDPMASGGGLADGSSKPRQSQEQARRKKMSRAQDGILKYMLKMMEVCRAQGFVYGIIPEKGKPVSGASDNLRAWWKEKVRFDRNGPAAIAKYQADNAVPGAENELASGAASPHSLQELQDTTLGSLLSALMQHCDPPQRRYPLEKGVPPPWWPTGDEEWWPELGIPKDQGPPPYKKPHDLKKAWKVSVLTAVIKHMSPDIEKIRRLVRQSKCLQDKMTAKEISTWLAVVKQEEELYLKMHPGARPPASTGGIASAISFNTTSSEYDVDIVDECKGDEAGNQKTAVTDPTSFNLGAAILSDKFLMPTPMKEETADVEFIQKRNAPAPAEPELMLNNRVYTCNNVQCPHSDYSYGFLDRNARNSHQYTCKYNDPITQSAENKPLPAPPQPQAFQPAFSQANQAANNLDFSLPMDGQRSIAELMNMYDTNFMTSKTMSSSDSVTIMERPNAMPQRIQMDEGFFGQGNGVFDDVNSMMQQQQQQAPPVVQQQQQQQFFIRDDTPFMSQMGDITSTAEFRFGSGFNMSSTAAAADYPGAAQKNDGTNWFY

SEQ ID NO: 1531 - protein, 254 aa, Gnetum gnemon
MGRGRVELKRIENKINRQVTFSKRRNGLLKKAYELSVLCDAEVALIIFSSRGKLYEFGSAGTLKTLERYQKCSYALQESNNSDRDAQTWHHEVSKLKTKVEILQRSQRHLLGEDLGPLSIRELQTLERQIEVALTQVRARKTQVMMDMMDDLKKKERLLQEVNKSLRKKLDETEGQVYSNAQLQAAPPPEWDSNAIANPVYALPPTPQNAVDCEPTCKLGIMLLLSQAFPGMIILRTTTYRGGWSNLIPDANNQ

SEQ ID NO: 1532 - protein, 541 aa, Triticum aestivum
MSAKASERTYRCSDDSQMAYYNNSVPLAENGRFYMMQNHLDVHYTSSGDGSQKISSNPQVFEAQYCTLESSSANGVYPTQSSTSSHSISPISGSPLSQNDSHSYHTYDSPPTASCVTEIPDFQSKLKELENAILGPELDIASDSPESLLQANHPLKQDNWRQLLGINTGDLKQVIIACGKAVAANDMYATELLISELGQLVSVSGDPMQRLGAYMLEGLVARLSFSGSKLYKSLKCKEPTSSELMSYMHLLCEICPFYKFGYMSANGAIAEAIKGENFVHIIDFQIAQGSQWITIIQALAARPGGPPFLRITGIDDSNSAYARGGGLDMVGTRLHSISASCGLPFEFNAVHAASHEVYIQHLDTRPGEAIVVNFAYQLHHTPDESVSVENHRDRIIRMIKSLSPRVVTLVEQESNTNTSAFLPRYLETLDYYTAMFESIDVALPRDDKRRISTEQHCVARDIVNLIACEGAERVERHEVFGKWKARFAMAGFRPYPLSSVVNNTIKTLLDSYHSCYRLEERDGVLYLGWKGRVLVVSSAWC

SEQ ID NO: 1533 - protein, 172 aa, Triticum aestivum
  misc_feature (44)..(44): Xaa can be any naturally occurring amino acid
  misc_feature (136)..(136): Xaa can be any naturally occurring amino acid
LRRRGLASGQQKRRRRKAQDRKKGIPWTEEEHRKFLDGLRQLGXGDWRGISKGFVTTRTATQVASHAQKYFLRQTNPGMKKRRASLFDVGIADYKDNQVPGPQSIVAAKPAPTQEIIHTDRGDVPIPRYRGSERFXGSNMQVNQLTDYYYFNKNSHVPGTSLSIGFRLEKGL

SEQ ID NO: 1534 - protein, 630 aa, Triticum aestivum
  misc_feature (14)..(14): Xaa can be any naturally occurring amino acid
SANQKAAFTEILDXLRAICHAHMLPLALTWVPSSNGSDGGYVGHDSVLDSQSGKAILRIHESPTHVNDAKMQGFFHACTETHLEKGQGIAGRALKSNLPFFSPNIREYGIKDYPLAHHARKFGLHAAVAIRLRSTYTGDDDYILEFFLPINCTGSEEQQMLLNNLSSTMQRICKSLRTVSEAEVDTARACTAVMYKATSGSCLPTGQSESSSRGDQPATEEAFQDLSLIDKQRGMSEQAQSSTMRLAEKKRSTAEKNIGMDVLRKYFSGSLKDAAKSLGVCPTTLKRICRTHGISRWPSRKINKVNRSLKKIQTVINSVHGVDSSLQYDPATGSLVPAVSLPEKTSFPSCDAVSSPSVGKTVDEKSGPKSEQGYSSPEGWERESCQLQRSDAQKGEGGEFHMQTTNYSGSGDHGSYGPNITHHISSEGTQGPLYPTGAVSALHDKETGCIEPLPCVLPSIKTTRDQIVGRNSPPMQQADIDMFDDREGREHTHPSTSGMTDSSSGSASSHPTFKKNPARPLKDKSSPALTVKATYNGDTVRFKFLPSMGWYNLLEEIAKRFKLSMGVFQLKYKDDEDEWVIMANDSDLQECVDVMDSMGTRNVKLQVRDLPCLISSSGSSSCLQLEGHNS

SEQ ID NO: 1535 - protein, 245 aa, Phalaenopsis amabilis
MGRGRVQLKRIENKINQQVTFSKRRSGLLKKAHEISVLCDADVALIIFSNKGKLCEYSTDSSMEKILERYEHYSYTERALYSNEDNPQADWRLEYNKMKAKVESLQKSQRHLMGEQLDYLSIKELQHLEQQLESSLKHIRSRKTQLMVDSISELQKKEKLLLEQNKTLQDMAKAKAKALVQNAAWEQQNKSQYSSEPPHAVISDSVPTPTSRTFQTRANGEESPQPQLRLGNSLLPPWMLSHVNG

SEQ ID NO: 1536 - protein, 804 aa, Arabidopsis thaliana
MSFRGIVQDLRDGFGSLSRRSFDFRLSSLHKGKAQGSSFREYSSSRDLLSPVIVQTSRWANLPPELLFDVIKRLEESESNWPARKHVVACASVCRSWRAMCQEIVLGPEICGKLTFPVSLKQPGPRDAMIQCFIKRDKSKLTFHLFLCLSPALLVENGKFLLSAKRTRRTTRTEYIISMDADNISRSSNSYLGKLRSNFLGTKFLVYDTQPPPNTSSSALITDRTSRSRFHSRRVSPKVPSGSYNIAQITYELNVLGTRGPRRMHCIMNSIPISSLEPGGSVPNQPEKLVPAPYSLDDSFRSNISFSKSSFDHRSLDFSSSRFSEMGISCDDNEEEASFRPLILKNKQPRWHEQLQCWCLNFRGRVTVASVKNFQLVAARQPQPQGTGAAAAPTSAPAHPEQDKVILQFGKVGKDMFTMDYSLNLVLTLANQYGNTMEKIHRNEQREEGFKLESEKNVKGKMVSVSLSHHNLWPPESGSTAFRGFATAASVHACHHVSRHLRLDFHLRSSLKKLQHFSDDARMKFARYQRVFVFNGANFLKSRVDIRLSQSSPFVCFFNGGESRLNPRGGEEGSSNPETSKRNTVNGRRWTNVLLAINVIMYIAQIASDGKVLTWGAKINSLIERGQLWRLATASVLHANPMHLMINCYSLNSIGPTAESLGGPKRFLAVYLTSAVAKPILRVLGSAMSYWFNKAPSVGASGAIFGLVGSVAVFVIRHKQMVRGGNEDLMQIAQIIALNMAMGLMSRRIDNWGHIGGLLGGTAMTWLLGPQWKYEYTTRDGRRVFMDSAPIPLLLRWRNEQRRL

SEQ ID NO: 1537 - protein, 284 aa, Physcomitrella patens
MGRGKIEIKKIENTTSRQVTFSKRRGGLLKKAHELAVLCDAEVALVIFSSTGKLFEYASSGSIRDIIDRYKKGSDGMQNGARNDFMGCEVVKLREQLEQLKASHRHMLGEDLSLLKVPDLLQLEQQLDLGASRVRARKNQLILEEVESLRRKEHELLIANEDLRQKLADAQGIADAVTARANVSESPRPLTSALTRDIVMSSQQQEVTVHPHPNLRDAQRSQTSLQLGMFSSESYLPSSSRGPSEHPIPVGPEGCAGESAMRWEHPHFHSQNRLHANISPSVRI

SEQ ID NO: 1538 - protein, 250 aa, Phalaenopsis amabilis
MGRGKVQLKRIENKINRQVTFSKRRSGLLKKAHEISVPCDAEVALVIFSAKGKLYGYSTDSCMDRILDRYERYCYAEKALQITEPESQGDICNEYGKLKNKIEALQKSRSHLMGEQLDSLSIKELQHLEQQLETALNHIRTQRIQLLLNCITEFQRKEKSLLEHNSLLEAKLCSFQLDPQITETATQNPNRKQQKQDQVNSSPSPFLPPNHLPTLNLGTYPASDGEEAEDPTLLQMNSISLPPWMLRSST

SEQ ID NO: 1539 - protein, 436 aa, Zea mays
MCGGAILSGFIPPSGVAAAAAAAKKKQQQRCRVTADLLWPGPGSKEAPQDQEEDFEADFREFERGLGEDDVDSAGEGGDPEVQELPPPEPTRFAFATAAKAAVDGVMTTTPKDVKGDRPVKRGRKNQYRGIRQRPWGKWAAEIRDPNKGVRVWLGTYNTAEEAARAYDAEARKIRGKKAKVNFPDDDAPGTGHRPANAAPRLVAPPPPPKACADEIFNNLKNDDDDDNNNNNDDLFAMFAFGDNKKKVPAAKPAAAEGGSGSGSFLVPAPAVAVVPGNKRRSSATNTMLSVSDDQRSNSYGSGSSDLVGSWSWDDDAAAAAMTSDYTSSVFAPDNAVLPAASYTQGGAPKRMRSSYGGAPPSLAHDAAMPGFGLDKVSYHHYQALPPYYVGSSNASVGNLGLLQQADDAPAPQDGASAGDIWSLDELLMLAAAGAY

SEQ ID NO: 1540 - protein, 164 aa, Lupinus polyphyllus
MARPQQRYRGFRQRHWGSWVSEIRHSILKTRIWQGTFESAEDAARAYDEAARLMCGTRARTNFPYNPNASQSSSSKLLSATLIAKLHRCYMASLQMTRPSSLPEAPRIIASPNNAVKGIGADAMLLPKKREQEEQETGGNLDFKKVKVECSQQFKPLEEDHIAQ

SEQ ID NO: 1541 - protein, 338 aa, Arachis hypogaea
MAVYDQSGDRNRTQIDTSRKRKSRSRGDGTTVAERLKRWKEYNETVEEVSTKKRKVPAKGSKKGCVKGKGGPENSRCSFRGVRQRIWGKWVAEIREPNRGSRLWLGTFPTAQEAASAYDEAAKAMYGPLARLNFPRSDASEVTSTSSQSEVCTVETPGCVHVKTEDPDCESKPFSGGVEPMYCLENGAEEMKRGVKADKHWLSEFEHNYWSDILKEKEKQKEQGIVGTCQQQQQDSLSVADYGWPNDVDQSHLDSSDMFDVDELLRDLNGDDVFAGLNQDRYPWNSVANGSYRPESQQSGFDPLQSLNYGIPPFQLEGKDGNGFFDDLSYLDLENVDA

SEQ ID NO: 1542 - protein, 658 aa, Zea mays
MEIKVMSLKLQLEKEAINNGTSPGQAHDIDIPPPRPKRKANSPYPRKSGLSSETPTKELPSDKSTKPNMPLSNENVLMAGDASLQKFQRKELSGKESCSEVLNLFRDAPSPSFSSVNKSSSNHGAPIEASKTKIRDMTIMENSSLNPNMQEDVKEINDQEMERLNGTQISSKCEHSHEGYLDISMQQMKLKPESVETTYVDKQTARASHSLAERTGTTSIPVTATEETHSVLTSDQVGINGSMNPSIHPMFPADPKFDSSATPQPFPHNYAAFAPMMQCNCNQDTYRSFTNMSSTFSSMLVSTLLSNPAIHAAARLAASYWPAAEGNTPIDPNQENPADGVQGRNIGSPPSMVSIVAATVAAASAWWATQGLLPFFAPPVAFPFVPAPSAAFPTVDVPRPSEKDRDCPAENAQIECQEARKQVQFEGLRVAASSESDGSGKGEVSLHTELKLSPAQNADATPTTGAGTNDAFRNKKKQDRSSCGSNTPSSSDVDAGNVPEEDNANEKAKQASCSNSSAGDTNHRRFRSNGSTSDSWKEVSEEGRLAFDALFSREKLPQSFSPPQAVDSKEVAKEEEDEVTTVAVDLNKNATSIDHDDLDTMDEPRASFPNELSHLKLKSRRTGFKPYKRCSVEAKENRVPASDMVGTKRIRLDSEAST

SEQ ID NO: 1543 - protein, 221 aa, Oryza sativa (japonica cultivar-group)
MDSEWSKKENKLFEEALAYYGEGAPDLFHKVSRAMGGTKTADEVRRHYEILEDDLKLIEARRVPFPNGMHDAPFCDYWFAHRLRDEAAGDRRWRWRWRWRCAPSPAADSPLPGRLLSRPTTERPRPDGLISPNGPYTFTGRPASLDHRMGHVAGPAKLGDGDKSSSKDAMGRGASLPTTLLVRWAVTCTTTTTRRRNDQAYSRGAPYRIPVALAIAIAILG

SEQ ID NO: 1544 - protein, 123 aa, Brassica napus
MHGGAWMWNHSKNEELEDDDESWEVKAFEQDTKGNIYGTTWPPRSYTCNFCRREFRSAQALGGHMNVHRRDRASKAHQGPAVRSGGGSGGGRTTFLSSCVPPSTTLIIQSTASNSEGFSHFNQ

SEQ ID NO: 1545 - protein, 523 aa, Arabidopsis thaliana
MKRSHQETSVEEEAPSMVEKLENGCGGGGDDNMDEFLAVLGYKVRSSDMADVAQKLEQLEMVLSNDIASSSNAFNDTVHYNPSDLSGWAQSMLSDLNYYPDLDPNRICDLRPITDDDECCSSNSNSNKRIRLGPWCDSVTSESTRSVVLIEETGVRLVQALVACAEAVQLENLSLADALVKRVGLLAASQAGAMGKVATYFAEALARRIYRIHPSAAAIDPSFEEILQMNFYDSCPYLKFAHFTANQAILEAVTTSRVVHVIDLGLNQGMQWPALMQALALRPGGPPSFRLTGVGNPSNREGIQELGWKLAQLAQAIGVEFKFNGLTTERLSDLEPDMFETRTESETLVVNSVFELHPVLSQPGSIEKLLATVKAVKPGLVTVVEQEANHNGDVFLDRFNEALHYYSSLFDSLEDGVVIPSQDRVMSEVYLGRQILNLVATEGSDRIERHETLAQWRKRMGSAGFDPVNLGSDAFKQASLLLALSGGGDGYRVEENDGSLMLAWQTKPLIAASAWKLAAELRR

SEQ ID NO: 1546 - protein, 231 aa, Brassica napus
STHASGEVESDYALLESIRRHLLGGEAELWFAESIPSSCFTESWGDLPLKENDSEDMLVYGLLNDPYDTSSPSSDLSCITDFLDLETSSKRPSDPPVVKAEPAESFAAATVEKQKAATAKGKHYRGVRQRPWGKFAAEIRDPAKNGARVWLGTFETAEDAAFAYDRAAFRMRGSRALLNFPLRVNSGEPDPVRITSKRSYTSSSSSDNGKLKRRRNTEEVPSEFQVKCEVA

SEQ ID NO: 1547 - protein, 516 aa, Brassica oleracea
MLYPQVHCSPQFQVIDNKKGFSDTPSKESFFTLESSTASGPLPSYESPSVSITSGRSPFSPQASCISDLHPSPENIYGSPLSGASSHVYDEAHVKNKIRELEVSLLSVDPKVEEYSGFTPAGKSWNWDELLALTPQLDLKEVLVEAARAVSEGDFAAACGFIDVLEQMVSVSGTPIQRLGTYMAEGLRARLQGTGGNIYRALKCNEPTGRELMSYMGVLYEICPYWKFAYNAANAAILEAVAGEKRVHIIDFQIAQGSQYMFLINELAKRPGGPPLLRVTGVDDSQSRYARGGGLSLIGEKLADMAQSRGVPFEFHDAIMSGCKVHREHLGVEPGFAVVVNFPYVLHHMPDESVSVENHRDRLLHLIKSLGPKLVTLVEQESNTNTSPFLSRFVETLDYYTAMFESIDAARPRDDKQRISAEQHCVARDIVNMIACEEAERVERHEVLGKWRVRMMMAGFMGWPVSSSAAFAASEMLKGYDKNYKLGESEGALYLFWKRRPMATCSAWKPNPNQIV

SEQ ID NO: 1548 - protein, 720 aa, Glycine max
  misc_feature (13)..(13): Xaa can be any naturally occurring amino acid
  misc_feature (189)..(189): Xaa can be any naturally occurring amino acid
  misc_feature (348)..(348): Xaa can be any naturally occurring amino acid
VDKICKALETVNXRSSEILDHPYTQICNEGRQNALSEILEILTVVCETLNLPLAQTWIPCKHRSVLAQGGGVKKSCSSFDGSCMGKVCMSTTDIAFYIIDAHLWGFREACVEHHLQQGQGVAGRAFLSHSMCFCSNITQFCKTDYPLVHYALMFGLTSCFTICLRSSHTGNDDYVLEFFQLRRPPPRVXLPPRITHIHEQKTLLGSILAIMKQHFQSLHIASGVEPEDGSIEIIEATIERVHTRLESIPIASSIKSPPRPDTSPNMGEEVPQDPSEQQILMYCNDINNGGSLGENAARNIDHMPSLETKNINKPLERKRGKTEKSISLEVLQRYFAGSLKDAAKSLGXQHGISRWPSRKINKVNRSLSKLKRVIESVQGAEGAFGLNSLSKSPLPIAVGSFPEPSTPNKFSLPASLSINPSEPQIKENELNASKALETNSQAVMEEDRLLGGRTPHLEKVINDKGRHTREVGKEPKRTRTGSGSSEDSTNPTSHGSCHDSPPNESSPVKNIFITSNNDQCAGLKRSPESTLQLTTNTPNRPAAYPMPDFVAAELQEPFGGMLIEDAGSSKDLRNLCPSVAETILEDMVPEACGTNIPGPDLSPKQSMGTPNKAVTPFVAMKEMKTVTIKATYREDIIRFRVSLTCGIVELKEEVAKRLKLEVGTFEIKYLDDDHEWVLIACDADLQECMDVSRSSGSKIIRVLVHDITSNLGSSCESSGE

SEQ ID NO: 1549 - protein, 150 aa, Zea mays
PDQLNFLFRSSGLRFSNLYCDPLIIPGGHKITARQRWQPTPMQLQILESIFDQGNGTPSKQKIKEITAELSQHGQISETNVYNWFQNRRARSKRKQAAASLPNNAESEAEADEEPLADKKPKSDRPPPPPPPIQDNTKATGASSRIPSFV

SEQ ID NO: 1550 - protein, 676 aa, Hordeum vulgare subsp. spontaneum
MFPLGARQPPPSAMDNHQQQQPPRGEHAAQPRCWEEFLHRKTIRVLLVETDDSTRQVVAALLRHCMYQVIPVENGHQAWAYLQDMQSNIDLVLTEVFMHGGLSGIDLLGRIMNHEVCKDIPVIMMSSHDSMGTVLSCLSNGAADFLAKPIRKNELKNLWAHVWRRSHSSSGSGSGSAIQTQKCTKSKSGDDSNNNSNDRNDDASMGLNARDGSDNGSGTQAQSSWTKRAVEIDSPQDMSPDQSADPPEGTCAHVNHPKSEICSNRWLPGTNNKKCQKPKETTNGDGFKGKELEIGAPGNLNTDDQSSPKESSVKPTDGRCEYLPHNNSSDTVMENLEEPIVRAADLIGSMAKNMDAQQAAARAIDAPNCSLQAPEGKDTDGENAMPYLELSLKRSRSTGEGAGPIQEEQRNVVRRSDLSAFTRYNMCAVSNQGGAGFVGSCSPNGDSSEAAKTVAAQMKQGSNGSSNNNDMGSTTKSVVTKPCGNNKVSPINGNTHTSAFHRVQPWTPATAAGKDKADEVSKKNVAAAAAAAKEMGCEAQSKHPCAAADDVNGGSAGGTAQSSVVNPSGPVEGHAANYGSNSFSNNNTNNGSTAATTAAAATVHAETGGGVDKRSNMMNMKRERRVAAVNKFREKRKERNFGKKVRYQSRKRLAEQRPRVRGQFVRQPPAPAAVER

SEQ ID NO: 1551 - protein, 211 aa, Arabidopsis thaliana
MARGKIQLKRIENPVHRQVTFCKRRTGLLKKAKELSVLCDAEIGVVIFSPQGKLFELATKGTMEGMIDKYMKCTGGGRGSSSATFTAQEQLQPPNLDPKDEINVLKQEIEMLQKGISYMFGGGDGAMNLEELLLLEKHLEYWISQIRSAKMDVMLQEIQSLRNKEGVLKNTNKYLLEKIEENNNSILDANFAVMETNYSYPLTMPSEIFQF

SEQ ID NO: 1552 - protein, 263 aa, Oryza sativa (japonica cultivar-group)
MEQHEEAAERKPSPPVIFRLFGVEVRGGGGGVDEEEYEEEEVEGGLFIKKSSSMPNLTSIDPLPVPADGGKRRASDDSELASGQQKRRRRKVQERKKGVPWTEEEHKKFLEGLRQLGKGDWRGISKNFVTSRTATQVASHAQKYFLRQTNPGKKKRRASLFDVVAECSDDQLPSPQSVGTKPPTQDIIHTDRGDVPILSYPVARGFRGDSVDELTEYVKRLKAAEDMSLSMISGLEMASSSISSLELSIAPPHCAIEAAIKVL

SEQ ID NO: 1553 - protein, 313 aa, Oryza sativa
  misc_feature (36)..(36): Xaa can be any naturally occurring amino acid
MACHYPDHGLAMDPSSAAASSPNPSFSPGGGGGAGXGGGEREKAAVAAHPLYERLLEAHVACLRVATPVDQLPRIDAQIAARPPPLAAASAAAAQPFLWTREELDLFMTHYVLLLCSFKEQLQQHVRVHAMEAVMGCWELEQSLQSLTGASPGEGTGATMSDDEDNQVDSEANMFDGNDGSDGMGFGPLMLTEGERSLVERVRHELKNELKQGYKEKLVDIREEILRKRRAGKLPGDTASILKAWWQAHSKWPYPTEDDKARLVQETGLQLKQINNWFINQRKRNWHSNPASSGEKTKKKRNVTGDGGAEQSW

SEQ ID NO: 1554 - protein, 363 aa, Solanum demissum
MDEVMLPGFRFHPTDEELVGFYLRRKVQQKPISIELIKQLDIYKYDPWDLPKLAAVGEKEWYFYCPRDRKYRNSARPNRVTGAGFWKATGRAAKGIKTDWMMHEFRLPSITDSTAPKRFLDKHIPPNDSWAICRIFKKANSNAHRALSHSWVSPPQVLPQNNTTSHDFLTSSHFTNNSNEMSSFIHKTSSTSPIQFNDLLQNSSNNNMSSSFTTLDLPLYKTLNSMSNHNNDPITSYTFSSSCVDNMNNIDASSLLLNMSSSIFGDYSIALPENIEGGGVHDDTTTTTFKEANNVIINNMEHMEELQWGNAVRSNNIGVIPLMNNFPLNMAADAWKTNLLWDSSSPCPSSEMSTSYSTNKCYT

SEQ ID NO: 1555 - protein, 1488 aa, Arabidopsis thaliana
MSFNSSHLLPPQEDLPLRHFTDQSQQPPPQRHFSETPSLVTASFLNLPTTLTTADSDLAPPHRNGDNSVADTNPRWLSFHSEMQNTGEVRSEVIDGVNADGETILGVVGGEDWRSASYKAAILRHPMYEQLLAAHVACLRVATPVDQIPRIDAQLSQLHTVAAKYSTLGVVVDNKELDHFMSHYVVLLCSFKEQLQHHVCVHAMEAITACWEIEQSLQSLTGVSPSESNGKTMSDDEDDNQVESEVNMFDGSLDGSDCLMGFGPLVPTERERSLMERVKKELKHELKQGFKEKIVDIREEIMRKRRAGKLPGDTTSVLKEWWRTHSKWPYPTVNTLAEKFCYHIVKSKEEDKAKLVQETGLQLKQINNWFINQRKRNWNSNSSTSSTLTKNKPAPQEERSPSLDDCLKLLKGERDEQRLAGLLLVTKFCKNDDIVSLNKVYEAVGTHFLDRLFRTGSGSGDGVDNRDVYLQISITVLAAFCRVPEIASSEEMVSRIPLIVEVMSKGITTNMLEDCYELLYLVSTACEAGLMTLINSGGLRVIAPQMSELPDGSHAMEVAIKILQLLVSKLDCGSMTIERFLELSLVIAAVARQFAVLHNALKFEALHLLSAVFSSEYSELLHEPLRSMPDNNWADYMRTGVVAILQNRVAPSEKLHALILAENMMSILGEKWLLGGVKLPNVDIPADRCLLLVLESSHVEISVLLNDLAYKKYEAPKDNSTAEDILLKQRYLPIVFSLVEKIIKYISSAGENEGTLSDEAVFQKVIKILNETVGAVFEYLRDAKEHGIKKGTDLLASVRVIGSYLAETPVACKEQVQDLLDYMLSVKGEDESSPFLSTCFLLPMLCQITMNAEGCKLLAYSRGDVAVVECLIKLIERCGESVDEDRSIFLACDTIMNILLKREEISPPEISTFASLLKALAYWADGSNDHSVVMMAASICSLIFDFTSEDALQLSRSSLDSLARLVTRSLSSSGQDMSDTADLLEIIRAVSSLPSVDRSFLLIQRLRIHGSSSSFPESSPSASILSGADPLKCTVSGGSLAKWITGISAGSALGFLYWSSGSSDSISGLFGGSNLLSFADSSTPSVCGVKVGDLKPRSFIPKLSLPGYSSGFIFGDAYRRKIFFNYEKRLRLQSPPEKVFEYFASVRTDKGEILMKPADLMRAIVPVFPPSESHLVREGYLTGERNPGELRCSPSEFFMLFDVDNDGLISFKDTYLVYVFGNRYIFFVTLLSIPESSFAVAFKMFDTDNNGEIDKEEFKTVMSLMRSQHRQGVGHRDGLRTGLHMTGSVEDGGLVEYFFGKDGSQKLKHDKFTKFMKDLTEEMLRLEFAHYDYKRRGSISAKDFALSMVAAADASHLSKLLDRVESLSEHPHLRDMRISLKEFKQFDELRSKLGPFSLALFAYGKANGLLTMKDFKRAASQVCGITLSDNVIEIAFHVFDSNQDGNLSVDEFLRVLHRRERDVAQPIAKGLSRYFSDGWKGSKNCSSS

SEQ ID NO: 1556 - protein, 301 aa, Lycopersicon esculentum
MNKGANGNQQLELPAGFRFHPTDDELVQHYLCRKCAGQSIAVSIIAEIDLYKFDPWQLPEKALYGEKEWYFFSPRDRKYPNGSRPNRAAGTGYWKATGADKPVGKPKTLGIKKALVFYAGKAPRGIKTNWIMHEYRLANVDRSAGKNNNLRLDDWVLCRIYNKKGTLEKHYNVDNKETTSFGEFDEEIKPKILPTQLAPMPPRPRSTPANDYFYFESSESMTRMHTTNSSSGSEHVLSPCDKEVQSAPKWDEDHRNTLDFQLNYLDGLLNEPFETQMQQQICNFDQFNNFQDMFLYMQKPY

SEQ ID NO: 1557 - protein, 332 aa, Triticum aestivum
  misc_feature (242)..(242): Xaa can be any naturally occurring amino acid
  misc_feature (269)..(269): Xaa can be any naturally occurring amino acid
MSGGQELNLPPGFRFHPTDEELVTHYLCRRCAGAPIAVPIITEIDLYKFDPWQLPKMALYGEKEWYFFSPRDRKYPNGSRPNRAAGSGYWKATGADKPVGTPKPLAIKKALVFYAGKAPKGEKTNWIMHEYRLADVDRSARKKNSLRLDDWVLCRIYNKKGGMEKPAAVDRKPAAMGGYGGGPGAMASSPPEQKPVMGMNANGGGGGAQPFRDFAAYYDRPSDSMPRLHADSSCSEQVLSPXEFPAGEVQSQPKISEWERSFASGGDPXNPAAGSMLEPQRRVRAGDPLLQDILMYWGQAVLSSKQTDRSVEASTSILGVWGDETGEPPLLT

SEQ ID NO: 1558 - protein, 197 aa, Raphanus sativus
MGRKKLEIKRIEKKSSRQVTFSKRRSGLIEKARQLSVLCDASVALLVVSSSGKLYSFSSGDNLVRILHRYEKQHADDLKALLDLQSKSLSYGSHNELLELVESKLVESNVGVSVDALVQLEGHLETALSLTRARKTELMLKLVDSLKEKEKLLKEENKVLASQMEKNNLAGAEADNMEIARAQISDINLPVTLPLLN

SEQ ID NO: 1559 - protein, 171 aa, Arabidopsis thaliana
MADGPASPGGGSHESGEHSPRSNVREQDRYLPIANISRIMKKALPANGKIAKDAKETVQECVSEFISFITSEASDKCQREKRKTINGDDLLWAMATLGFEDYIDPLKIYLTRYREMEGDTKGSAKGGDSSSKKDVQPSPNAQLAHQGSFSQGVSYTISQGQHMMVPMQGPE

SEQ ID NO: 1560 - protein, 326 aa, Triticum aestivum
  misc_feature (152)..(152): Xaa can be any naturally occurring amino acid
MMGGGAAMMDRRMAFPAADGDVEKGFGFFGAGCFVGAGDLVDPVTAPAPEQRDRFADEEESEEDEDDDVDGIEELERRMWRDRMRLKRLKELQQRQSQRPDGGAASKGWPRRPASQQDQQARRKKMSRAQDGILKYMLKMMEACSAQGFVYXPENGKPVGGASDNLRAWWKEKVRFDRNAPAAIAKHRSDNAAPLCGGEDGAGAAAGPRSLHELQDTTLGSLLSSLMQHCDPPQRRFPLEKGVPPPWWPQGPSEAWWPEAGVPDDLGPPPYKKPHDLKKAWKVAVPPGIKHMSSDLNQAPPVPRVNPCCPALHYVRLSTSTFAPLR

SEQ ID NO: 1561 - protein, 179 aa, Brassica napus
  misc_feature (11)..(11): Xaa can be any naturally occurring amino acid
  misc_feature (17)..(17): Xaa can be any naturally occurring amino acid
  misc_feature (20)..(20): Xaa can be any naturally occurring amino acid
  misc_feature (27)..(27): Xaa can be any naturally occurring amino acid
  misc_feature (33)..(33): Xaa can be any naturally occurring amino acid
  misc_feature (35)..(35): Xaa can be any naturally occurring amino acid
  misc_feature (38)..(38): Xaa can be any naturally occurring amino acid
  misc_feature (94)..(94): Xaa can be any naturally occurring amino acid
  misc_feature (133)..(133): Xaa can be any naturally occurring amino acid
GTRGPRRMHCXMNSIPXSSXEPGGSVXNQPEKXVXGRXDESFRSNISFSKSSLDYRSVDFSSARFSEMGVVSCEEDQEETSFRPLVLKNKQPRXHEQLQCWCLNFRGRVTVASVKNFQLVAVRQPQTQGTGGXAPAPGAHGEQDKVILQFGKVGKDMFTMDYRYPLSAFSSVCDLLEQL

SEQ ID NO: 1562 - protein, 179 aa, Gossypium hirsutum
MLVFGYLRDALTVGWAPSDHSSPTFPPIKPEPQEIPTETAVKEVPTVANAAVPTVVPAKGKHYRGVRQRPWGKFAAEIRDPAKNGARVWLGTFETAEDAALAYDKAAYRMRGSRALLNFPLRVNSGEPDPVRITSKRATPEPSTSSSSGSENGSPKRRRKVGSAAPVVAQAGLNMGFGA

SEQ ID NO: 1563 - protein, 236 aa, Nicotiana tabacum
MNQPIYTELPPANFPGEFPVYRRNSSFSRLIPCLTETWGDLPLKVDDSEDMVIYTLLKDALNVGWSPFNFSAGEVKSEQREEEIVVSPAETTAAPAAELPRGRHYRGVRRRPWGKFAAEIRDPAKNGARVWLGTYETDEEAAIAYDKAAYRMRGSKAHLNFPHRIGLNEPEPVRVTAKRRASPEPASSSENSSPKRRRKAVATEKSEAVEVESKSNVLQTGCQVELLTRRHQLLVS

SEQ ID NO: 1564 - protein, 342 aa, Populus trichocarpa
QPIRQRRTGKKDRHSKIHTAQGPRDRRMRLSLQIARKFFDLQDMLGFDKASKTIEWLFTKSKAAIKELTDTVPKVRKCSSTSAGKSVSSTSESEVVSGIKLTPDTNGDRRVMEAKSDSLVSKPKEKRSKKVHKPVFNPVDRESREKARARARDRTREKMKNKGINKSSQSSQANPDNLEKFGYSSTLEYGENLASGRQEINSSVKVVDEEEESNNHHHLLPHQMDHVSIIDKFFGITNSPRSSSIFDFSESIEVPSGATLKDEFSGFPLKWDVTNGRVQYKYNALPNMKLPSGNVQAQNPNVNFMTTPHALEPNLSTMIMTTLNAHVEESPNSAFVNMPNPN

SEQ ID NO: 1565 - protein, 185 aa, Pharus virescens
EMRRIENKINRQVTFAMRRNGLLKKAYELSVLCDAEVALIIFSNRGKLYEFCSGQSMTKTLERYQKCSYGGPETAIQNKENELVQSSRNEYLKLKARVENLQRTQRNLLGEDLGSLGIKELEQLEKQLDSSLRHIRSTRTQQMLDQLTDLQRREQMLCEANKCLRRKLEESNQVHGQQVWEHGAN

SEQ ID NO: 1566 - protein, 625 aa, Oryza sativa (indica cultivar-group)
MKREYQEAGGSSGGGSSADMGSCKDKVMAGAAGEEEDVDELLAALGYKVRSSDMADVAQKLEQLEMAMGMAGVSAPGAADDGFVSHLATDTVHYNPSDLSSWVESMLSELNAPLPPIPPAPPAARHASTSSTVTGGGGSGFFELPAAADSSSSTYALRPISLPVVATADPSAADSARDTKRMRTGGGSTSSSSSSSSSLGGGASRGSVVEAAPPAMQGAAAANAPAVPVVVVDTQEAGIRLVHALLACAEAVQQENFAAAEALVKQIPTLAASQGGAMRKVAAYFGEALARRVYRFRPADSTLLDAAFADLLHAHFYESCPYLKFAHFTANQAILEAFAGCRRVHVVDFGIKQGMQWPALLQALALRPGGPPSFRLTGVGPPQPDETDALQQVGWKLAQFAHTIRVDFQYRGLVAATLADLEPFMLQPEGEADANEEPEVIAVNSVFELHRLLAQPGALEKVLGTVHAVRPRIVTVVEQEANHNSGSFLDRFTESLHYYSTMFDSLEGGSSGQAELSPPAAGGGGGTDQVMSEVYLGRQICNVVACEGAERTERHETLGQWRNRLGRAGFEPVHLGSNAYKQASTLLALFAGGDGYRVEEKEGCLTLGWHTRPLIATSAWRVAAA

SEQ ID NO: 1567 - protein, 398 aa, Zea mays
  misc_feature (326)..(326): Xaa can be any naturally occurring amino acid
MGEGDDDRRDELLGAGRDHEPEPADAEEAKKPAPGEAEAGNGAGAEAATCDYCGTAAAAVYCRADSARLCLPCDRLVHGANGVCSRHARAPLCAGCCAAGAVFRRASTSAFLCSNCDFGRHRDGGDPPLHDRCAVQPYSGCPPASDLAALLAVPLFDKPAAEDGAWWNIWEEPQVLSLEDLIVPTTPCHGFEPLLTPPSPKNRSISPDRKVNEEILRQLGELAESDGGMQASAGREEAEQAGGDQFPSWASPQYATGHGNFGTEDNHENGRWNNSEYHDLNDACKLEVTYDQAPVNSAEPCLSSFAPLSEICPSMSNGSSKEDNHXQANPGIGMPMQGLPKRSGFDVVPCPDRDSVISRYKAKRKTRRFDRQVRYESRKVRADGRLRIKGRFAKANQT

SEQ ID NO: 1568 - protein, 720 aa, Zea mays
MEMNSSGEETVVKVRKPYTITKQRERWTEAEHKRFLEALKLYGRAWQRIEEHVGTKTAVQIRSHAQKFFTKLEKEAMNNGTSPGQAHDIDIPPPRPKRKPNSPYPRKSCLSSETQTKELPNDKSTKPNMPLSNGHVKMVGDASLQNFQRKELSEKGSRSEVLNLFRDAPSASFSSVNKSSSNHGAPRRTEASKTESRDMSIMENNSFNPNTQEDVKVISDQEMERLNGIQIRSKCEHSHEGYLDISTQQMKLMPKSVETTYVDEQTARASHTLAESNGTASVPVTVPEGTHPDQTSDQVGINGSMNPCIHPMVSADPKFGSSATPQTFPHNYAAFAPMMQCNCNQDTYRSFTNMSSTFSSMLVSTLLSNPAIHAAARLAASYWPAAEGNTPIDPNQENPADGVQGRNIGSPPSMASIVAATVAAASAWWATQGLLPFFAPPVAFPFVPAPSAAFPTVDVPRPSEKDRDCPVENAQNECQEARKQVQFEGLRVAASSESDGSGKGEVSLHTELKLSPAQNADATPTTGAGTNDAFRNKKKQDRSSCGSNTPSSSDVDAGNVPEEDNANEKAKQASCSNSSAGDTNHRRFRSNGSTSDSWKEVSEEGRLAFDALFSREKLPQSFSPPQAVDSKEVAKEEEDEVTTVAVDLNKNATSIDHDDLDTMDEPRASFPNELSHLKLKSRRTGFKPYKRCSVEAKENRVPTSDMVGTKRIRLDSEAST

SEQ ID NO: 1569 - protein, 296 aa, Saccharum officinarum
MSGGGQDLQLPPGFRFHPTDEELVMHYLCRRCASLPIAVPIIAEIDLYKFDPWQLPRMALYGEKEWYFFSPRDRKYPNGSRPNRAAGSGYWKATGADKPVGTPKPLAIKKALVFYAGKAPKGEKTNWIMHEYRLADVDRSARKKNSLRLDDWVLCRIYNKKGGLEKPAAASSGDHKPMVFAAGAVSSPPEQKPFVATPGGLPPAAFTADLAAYYDRPSDSMPRLHADSSCSEQVLSPEQLACDREVQSQPKISEWERTFASDPVNPAGSMLVDPVVGGHAGDPLLQDILMYWGKPF

SEQ ID NO: 1570 - protein, 186 aa, Emericella nidulans
MSSTSPSKEPEVEQEPHSGEEHEQMDKEQDNQTQGQGEFEVKEQDRWLPIANVARIMKLALPENAKIAKEAKECMQECVSEFISFITSEASEKCQQEKRKTVNGEDILFAMTSLGFENYAEALKIYLSKYRETQSARGEHQNRPPSSGYAGGDPSAELPAALQSCVPGVLQLEAPSPKPLIMQAAL

SEQ ID NO: 1571 - protein, 375 aa, Oryza sativa (japonica cultivar-group)
MAFHGHLPHEMTMQALGADDAAVAAAAAAGGVGAGGAPAWMRYNDGSFLHLQTTSDSSASPSGAAAAAAAAAAAAAAGVQQWMGGGGGGEDAVAAAMGGGGEADAARCKAEILAHPLYEQLLSAHVACLRIATPVDQLPRIDAQLAQSQGVVAKYSALAAAAAGDDGRELDQFMTHYVLLLCSFKEQLQQHVRVHAMEAVMACWELEQNLQSLTGASPGEGTGATMSDGEDDQADSEANMYDPSLDGADNMGFGLPTESERSLMERVRQELKHELKQGYKEKLIDIREEILRKRRAGKLPGDTTSTLKAWWQSHAKWPYPTEEDKARLVQETGLQLKQINNWFINQRKRNWHSNPSSSTSVKTKRKRAGGIHPKQ

SEQ ID NO: 1572 - protein, 90 aa, Brassica napus
MDDGEVEFPLSSSSMDSFFDELLRDSHACTHTHTCNPPGPENTHTHTCPPLPAPTSAHTHTHLHVHTKILPAQAEDREATDDTSESSGNK

SEQ ID NO: 1573 - protein, 374 aa, Oryza sativa (japonica cultivar-group)
MAFHGHLPHEMTMQALGADDAAVAAAAAAGGVGAGGAPAWMRYNDGSFLHLQTTSDSSASPSGAAAAAAAAAAAAAAGVQQWMGGGGGGEDAVAAAMGGGGEADAARCKAEILAHPLYEQLLSAHVACLRIATPVDQLPRIDAQLAQSQGVVAKYSALAAAAAGDDGRELDQFMTHYVLLLCSFKEQLQQHVRVHAMEAVMACWELEQNLQSLTGASPGEGTGATMSDGEDDQADSEANMYDPSLDGADNMGFGLPTESERSLMERVRQELKHELKQGYKEKLIDIREEILRKRRAGKLPGDTTSTLKAWWQSHAKWPYPTEEDKARLVQETGLQLKQINNWFINQRKRNWHSNPSSSTSVKTKRKSNAGDNNS

SEQ ID NO: 1574 - protein, 273 aa, Triticum aestivum
MDSVESFQFFQIILENSWTRLRLPDKFTRVLLELDGGKPQEVKLRNAGHGRRFWDVKVVLDADGHMYLGRGWEQFARAYDLRLGYFLVFSFDGDAVLTVKVFDVSMCRRHYQHDDDGSTSSGSSSDGDSGSSDGDGGSSNGDGGGNSSSMAVMGIDDGPASLFTVMLRECNLGVRQKQYLNVPVEFQNAHGYAERSKVELRMRGKSWFVNLKHSPRSRGRPRASLRYGWHQFCVDNGLGVGDTCFFRALGEGSAGEVHLLKVEVRKRDGSFLV

SEQ ID NO: 1575 - protein, 181 aa, Triticum aestivum
MPLSLGADHLAAPGARAPPARVGTGMGMDTSLSLGGAAAYLPLNENDSLDMLLFDVLREASAVAAASPSSSSSPPTKTATAIAAAGADAIESGGACAAGRAAERPHYRGVRRRPWGKYAAEIRDPSRPGTRLWLGTFGTAEEAAVAYDRAAFRLRGAKALLNFPPAVGAHEARRGGANEAR

SEQ ID NO: 1576 - protein, 444 aa, Arabidopsis thaliana
MEKSGFSPVGLRVLVVDDDPTWLKILEKMLKKCSYEVTTCGLAREALRLLRERKDGYDIVISDVNMPDMDGFKLLEHVGLELDLPVIMMSVDGETSRVMKGVHTGACDYLLKPIRMKELKIIWQHVLRKKLQEVRDIEGCGYEGGADWITRYDEAHFLGGGEDVSFGKKRKDFDFEKKLLQDESDPSSSSSKKARVVWSFELHHKFVNAVNQIGCDHKAGPKKILDLMNVPWLTRENVASHLQKYRLYLSRLEKGKELKCYSGGVKNADSSPKDVEVNSGYQSPGRSSYVFSGGNSLIQKATEIDPKPLASASLSDPNTDVIMPPKTKKTRIGFDPPISSSAFDSLLPWNDVPEVLESKPVLYENSFLQQQPLPSQSSYVAISAPSLMEEEMKPPYETPAGGSSVNADEFLMPQDKIPTVTLQDLDPSAMKLQEFNTEGDSEEA

SEQ ID NO: 1577 - protein, 441 aa, Zea mays
MCGGAILSGFIPPSGVAAAAAAAKKQQQQQQRCRVTADLLWPGPGSKGAPQDKEEDFEADFREFERGLGEDDVDSAGEGGDPEVQELPPPEPTRFAFATAAKAAVDGVMTTTPKDVQGDRAVKKRGRKNQYRGIRQRPWGKWAAEIRDPNKGVRVWLGTYNTAEEAARAYDAEARKIRGKKAKVNFPDDDATGTRHRPTNAANAARLVAPPPPPKACADEMFNNLKNDDGDNNNNDDLFAMFAFGDNKKKVPAAKPAADEVGSGSGSFLVPAPAVAAVPGNKRRSSATNIMLSVSDDQSSNSYGSGSSADLVGSWSWDDDDAAAAAAAAAMTSVFAPDNAVLPAASYSYMQGGAPKRMRRSYGGAPPSLAHDAAMPGFGLDKVSYHYQALPPYYVGSSNASVGNLGLLQQADDAPAPQDGASAGDIWSLDELLMLAAAGAY

SEQ ID NO: 1578 - protein, 403 aa, Arabidopsis thaliana
MGRHSCCYKQKLRKGLWSPEEDEKLLTHITNHGHGCWSSVPKLAGLQRCGKSCRLRWINYLRPDLKRGAFSPEEENLIVELHAVLGNRWSQIASRLPGRTDNEIKNLWNSSIKKKLKQRGIDPNTHKPISEVESFSDKDKPTTSNNKRSGNDHKSPSSSSATNQDFFLERPSDLSDYFGFQKLNFNSNLGLSVTTDSSLCSMIPPQFSPGNMVGSVLQTPVCVKPSISLPPDNNSSSPISGGDHVKLAAPNWEFQTNNNNTSNFFDNGGFSWSIPNSSTSSSQVKPNHNFEEIKWSEYLNTPFFIGSTVQSQTSQPIYIKSETDYLANVSNMTDPWSQNENLGTTETSDVFSKDLQRMAVSFERSVFAINLLKNNDERNKSVSVCFRERIVIHSHILHHFSDL

SEQ ID NO: 1579 - protein, 427 aa, Zea mays
MGRHSCCYKQKLRKGLWSPEEDEKLMNHITKHGHGCWSTVPKLAGLQRCGKSCRLRWINYLRPDLKRGAFSEEEEDLIVELHAVLGNRWSQIATRLPGRTDNEIKNLWNSSIKKKLRQKGIDPNTHKPLLVEVERSKAAPTTSTERTSESNDVDPSSGAALGNSSHLLLSETAQSPQLPALGKHRRETTSLAHLRVPPKELFLDQLASGHENLTGCRTAGPVPNFPFQQLMCYNNEFGNKNGASNNSLWFNHNETSGSTISTVMPPVSPSTLSTSTGLNRSPDNPHSGGTAIQSTQFYWDAANPSSCSSRGSSGSNGLGFELQSTSSLLESSVFPWTELTPDKNSQVQLGEELKWPDLLHGTFTDTHATMQNLSQSLYEDVIKAESQFNIEGLCAAWSQNLQPQQHLQVSDLYDKDLQRMSLSFENI

SEQ ID NO: 1580 - protein, 110 aa, Musa x paradisiaca
ACAEAVQPVSLKAADALVKQITLLTTSQGGAMRKVAGYFAEALARRIYRPQPHRGVGCSSQDSAALDNILHVHFYESSPYLKFAQLTANQAILEALRANSFKPAGLDFRP

SEQ ID NO: 1581 - protein, 222 aa, Eupomatia bennettii
KRRMGLLKKAHEISVLCDAEVALIVFSTRGKLYEYSTDSCMSRILDRYERDSYAERELVVSGLESEGSWCLEYSKLKAKVEALQRNLRHFTGEDLETLSLKELQQLEHQLDAALKHIRSRKNQIMSESIAELQRKERLLQEQNQMLEKKVQEKEKAMAQQAQWDHQNQSQSSLSFLLATPLPTLNIGTYHQANGVGAEEEGARRSARTNSLMPPWMLRHVNE

SEQ ID NO: 1582 - protein, 94 aa, Musa x paradisiaca
ACAEAVQQENLKAADALVKHISVLAASQDGPMRKVAGYFAEAIARRIYRRRPLSQVDRALDSPALEDLLHLHGYESCPYLKFAHFKGNQAILEA

SEQ ID NO: 1583 - protein, 674 aa, Hordeum vulgare subsp. vulgare
MFPLGARQPPPSAMDNQQQQQPPRGEHAAQPRCWEEFLHRKTIRVLLVETDDSTRQVVAALLRHCMYQVIPVENGHQAWAYLQDMQSNIDLVLTEVFMHGGLSGIDLLGRIMNHEVCKDIPVIMMSSHDSMGTVLSCLSNGAADFLAKPIRKNELKNLWAHVWRRSHSSSGSGSGSAIQTQKCTKSKSGDDSNNNSNDRNDDASMGLNARDGSDNGSGTQSSWTKRAVEIDSPQDMSPDQSADPPEGTCAHVNHPKSEICSNRWLPGTNNKKCQKPKETTNGDGFKGKELEIGAPGNLNTDDQSSPNESSVKPTDGRCEYLPQNNSSDTVMENLEEPIVRAADLIGSMAKNMDAQQAAARAIDAPNCSLQASEGKDTDGENAMPYLELSLKRSRSTGEGAGPIQEEQRNVVRRSDLSAFTRYNMCAVSNQGGAGFVGSCSPNGDSSEAAKTVAAQMKQGSNGSSNNNDMGSTTKSVVTKPCGNNKVSPINGNTHTSAFHRVQPWTPATAAGKDKADEVSKKNVAAAAAAAKEMGCEAQSKHPCAAADDVNGGSAGGTAQSSVVNPSGPVEGHTANYGSNSFSNNNTNNGSTAATTAAAAAVHAETGGGVDKRSNMMNMKRERRVAAVNKFREKRKERNFGKKVRYQSRKRLAEQRPRVRWQFVRQPPAPATVER

SEQ ID NO: 1584 - protein, 573 aa, Arabidopsis thaliana
MTVEQNLEALDQFPVGMRVLAVDDDQTCLKILESLLRHCQYHVTTTNQAQKALELLRENKNKFDLVISDVDMPDMDGFKLLELVGLEMDLPVIMLSAHSDPKYVMKGVTHGACDYLLKPVRIEELKNIWQHVVRSRFDKNRGSNNNGDKRDGSGNEGVGNSDPNNGKGNRKRKDQYNEDEDEDRDDNDDSCAQKKQRVVWTVELHKKFVAAVNQLGYEKAMPKKILDLMNVEKLTRENVASHLQKFRLYLKRISGVANQQAIMANSELHFMQMNGLDGFHHRPIPVGSGQYHGGAPAMRSFPPNGILGRLNSSSGIGVRSLSSPPAGMFLQNQTDIGKFHHVSSLPLNHSDGGNILQGLPMPLEFDQLQTNNNKSRNMNSNKSIAGTSMAFPSFSTQQNSLISAPNNNVVVLEGHPQATPPGFPGHQINKRLEHWSNAVSSSTHPPPPAHNSNSINHQFDVSPLPHSRPDPLEWNNVSSSYSIPFCDSANTLSSPALDTTNPRAFCRNTDFDSNTNVQPGVFYGPSTDAMALLSSSNPKEGFVVGQQKLQSGGFMVADAGSLDDIVNSTMKQV

SEQ ID NO: 1585 - protein, 236 aa, Magnolia grandiflora
QLKRIENKINRQVTFSKRRMGLLKKAHEISVLCDAEVAVIVFSTKGKLYEYSTDSRMSRILERYERYSYAERELVLSGPESEGSWCLEYGKLKAKVESLQRNLRHFTGEDLDTLSLKELQQLEHQLDAALKHIRSRKNQIMFDSIAELQRKEKSLREQNNMLEKEIQEKEKAMAQQAQWEQQNQSQSSPSFLLASPLPTLNIGTYHQGNEVEEEGARPPARTNSLMPPWMVRHVNE

SEQ ID NO: 1586 - protein, 105 aa, Musa x paradisiaca
ACAEAVQQENLKAADALVKHISVLAASQDGPMRKVAGYFAEAVARRIYRRRPLSQVDRALDSPALEDLLHLHFYESCPYLKFAHFTANQAILEALRANSFKPAGL

SEQ ID NO: 1587 - protein, 648 aa, Nicotiana tabacum
MVDLLGSNSQLKHFEGDNALCREIWRACSGSLLDVPKLGERVHYFPRLHMDQLEQSSNLEWIQGLQLSHLPRKILCRVLHIRLLVEHDTEEVYAETILLPNQEQNEPSTPEFCPLEPPRPQYQSFCKALTTSDIKSNWGLSVHRKDANKCFPPLDMMQEKPTQELIVNDLQGNEWRFKHVFQGQPRRHLLKHGWSTFVTSKKLLAGDLVVFLRDETGKLHVGIRRLSYQCNSVGSSTFSRQSMEGVLAVASHAFATRSLFSVYYKPCYNRSSQFIMSLSNYFEGGNHGPGVGTISRTQHTSLDSHVKRTSGMDQMSFPQGQHKTNLLLEEDQYMQDSEAISNSARPTMMALEIGQQSVESLNNIHHIEDSVLQPHTAVARENNERFIPNETVAIQAQDENFDELFKETDFPDFVNTSLDTITLDWDSDLRSTIQDFDEWLEETNPPGLQTCSEDHSRQTSSILEQPTSSQVMSISSTPSRIPYEGPGRGDEQVPWGSYQVARRCLPILNRVVSRYPDSLVNFKVTSSIFQSVCLEILAELVYFLDNLTVMNLSKDQFNVAGQHLWDLKLSGIELGWLEKRLAHIDGAFSMENLLQRRQVVTLRMGDTLATFRQLDEELGCINKELHQLSLKVGPNPPMRFHPVLEGLL

SEQ ID NO: 1588 - protein, 263 aa, Hordeum vulgare subsp. vulgare
MGRGRVELKRIENKINRQVTFSKRRNGLLKKAYELSVLCDAEVALIIFSSRGKLYEFGSAGTTKTLERYQHCCYNAQDSNGALSETQSWYQEMSKLKAKFEALQRTQRHLLGEDLGPLSVKELQQLEKQLECSLSQARQRKTQLMMEQVEELRRKERQLGDINRQLKHKLDAEGSNSNNYRTMQQITWAAGTVVDEGAAAYHMQQQQQQQQQHPNHSAAMDCEPTLQIGYPHHQFAAPDQVANNIPRSSAPGGENNFMLGWVL

SEQ ID NO: 1589 - protein, 235 aa, Streptochaeta angustifolia
EMRRIENKISRQVTFAERRNGLPKKAYELSLLCDAEVALIIFSSGRLFEFSSASCMYRTLERYRTCNYRSHEAAAPIETESNYQEYLKLKTRVEFLQTTQRNLPGEDLGPLNMKELEQLENQIESSLKNIRSTKNQTLLDQLFDLRHKQQQLQDLNKDLRRKLQEVGGHDNALQVWEDGGPSGSAGHEHLQGLLQPSEIDPSLQIGYHQAYLDQLNNGQIAQYPNGHLPSSAPWI

SEQ ID NO: 1590 - protein, 219 aa, Sorghum bicolor
EMRRIENKISRQVTFAKRRNGLLKKAYELSVLCDAEVALIIFSSRGRLFEFSTSSCTYKTLERYRSCNFASEASAPLEAELNNYQEYLKLKTKVEFLQTTQRNLLGEDLGPLNVKELEQLENQIEISLKHIRSSKNRQMLDQLFDLKRKEQQLQDANKDLRRKGPETSEENVLRLSCQDIGCSGSSGHPGEANQERLHLALDPSLHIGYQAYRDHMNNN

SEQ ID NO: 1591 - protein, 222 aa, Chasmanthium latifolium
ELRRIENKISRQETFAKRRNGLLKKAYELSVLCDAEVAHIIFSSRGRLYEFSTSSCIYKTLERYRSCSYASEASAPMEAELSNYQGYLKLKTRVEFLLTTQRNLLGEDLGPLSAKELEQFENQVEISLKHIRSTKSRQLLDQLFELKRKEQQLQDANKDLRRKIQDTSGENMLRMTCKDIGSSGSSSGHARDAKHQELPHSGVCDPSLRIGYQAYMDQLNNE

SEQ ID NO: 1592 - protein, 221 aa, Pennisetum glaucum
  misc_feature (12)..(12): Xaa can be any naturally occurring amino acid
  misc_feature (202)..(202): Xaa can be any naturally occurring amino acid
EMRRLENKISRXVTSAKRRNGLLKKAYEVAVLCDAEVALIIFSSRGRLFEFSTSSCMYETLEQYRSCNFTSEASSAPIEAELSNYEEYLKLKTRIEFLQTTQRNLLGEDLGPLSTKELEQLENQIEISLKHIRSSKNQQMLDQLFELKRKEQQLQDSNKDLRKKIQETSEENVLRPTFQDLGACGSSGHPRDANQEYLRQLXCDPTLRIGYQSYIDHLSNE

SEQ ID NO: 1593 - protein, 318 aa, Triticum aestivum
WIPRAAGIRHQPSMASVVAATVAAASAWWATQGLLPLFAPPMAFPFVPVPTASFPTTDVQRATENCPVDNAPKECQVVQEQGQPEAMIVVASSGSDKSGKGEVSPHTELNISPADKVETTPPTGAETSDAFGNKKKQDRSSCGSNTPSSSDVEAEHVPENQDQANDKTQQACCSNSSAGDMNHRRFRNISSTNDSWKEVSEEGRMAFDKLFSRGKLPQSFSPPQAEGLKVVPRGEQDEATTVTVDLNKSAAVMDHELDTLVGPRAATFPIELSHLNMKSRRTGFKPYKRCSVEAKENRVPAADEVGTKRIRLDSEPST

SEQ ID NO: 1594 - protein, 203 aa, Solanum demissum
MDILGNLYIDPLPLVIPTTTSSTTFDNNSNEKVMLLLASKIPKRRGDRKKFHETRHPVYRGVRWKNFEKWVSEVRVPAKKSRIWLGTFPNAEMAAKAHDVAVMALKGRSACLNFADSTWRLPVPASAAVKDIQKAAAEAAEAFRVSESLERENSEEVVINNDDHYVVDSGWRLVIPASAVARDIQKAVAEAFCPSESSKGEYF

SEQ ID NO: 1595 - protein, 315 aa, Brassica oleracea
MTRRCSHCNQNGHNSRTCPNRGVKLFGVRLTEGSIRKSASMGNLSHHSGSGLSGLVSNNPGSPGNGPDHDGYASEDFVPGSSSSHRERKKGNPWREEEHRMFLLGLQKLGKGDWRGISRNYVKTRTPTQVASHAQKYFIRQSNVSRRKRRSSLFDIIPDEATDSVPAAPLILETEECESMKSTNSVGVEAPEDSIQTQLQPPPPGSFPVLYPAYFSPFYSFPFPVWPAAYDTEPAKEETHQILRPTAVHSKAAPIKVDQLLGMSKLSLKESSQNGVSEESLSLKLVGGSSSRQSAFHPNPASDGGSDMNTVIHAV

SEQ ID NO: 1596 - protein, 173 aa, Arabidopsis thaliana
MAESQAKSPGGCGSHESGGDQSPRSLHVREQDRFLPIANISRIMKRGLPANGKIAKDAKEIVQECVSEFISFVTSEASDKCQREKRKTINGDDLLWAMATLGFEDYMEPLKVYLMRYREMEGDTKGSAKGGDPNAKKDGQSSQNGQFSQLAHQGPYGNSQAQQHMMVPMPGTD

SEQ ID NO: 1597 - protein, 447 aa, Capsella rubella
MLTSFKSSSSSSEDATTETPPPPFCQLASSSSSSAATSASHHLRRLLFTAADFVSQSNFTAARNLLSILSLNSSPYGDSTQRLAHLFTKALSLRINRLQQEQDPTVATCTTNEMTMSTNSTVFTSSVCKEQFLFRTKNNNSDFESCYYLWLNQLTPFIRFGHLTANQAILDATETNDNGALHILDLDISQGLQWPPLMQALAERSSSPNSPPPSLRITGCGRDVTGLNRTGDRLTRFANSLGLQFQFHKLVIVDEDLPGLLLQIRLLALSAVQGETIAVNCVHFLYKFFNDDADLIGHFLTVIKSLNPRIVTMAEREANHGDHSFLIRFSEALDHYVAIFDSLEATLPPNSRERLTLEQRWFGKEIMDVVAAEATERKQRHRRFEIWGEMMKRFGFVNVPIGSFALSQAKLLLRLHYPSEGYNLQFLNDSLFLGWQNRLLFSVSSWK

SEQ ID NO: 1598 - protein, 315 aa, Zea mays
HAVESCPYLKFAHFTLNQAILEAFAGCRRVHVVDFGIKLVMQWPALLQALALRPGGPPSFRLTGVGPPQPDETDALQQVGWKLAQFAHTIRVDFQYRGLVAATLADLEPFMLRPEGGGDTDDEPEVIAVNSVCELHRLLAQPGTLDKVLGTVRAVRPRIVTVVEQEANHNSGTFLDRFTESLHYYSTMFDSLEGAGSGSGSGSGSGQPTDASPPAGTDQVMSEVYLGRQICNIVACEGAERTERHETLVQWRGRLGGSGFEPVHLGSNAYKQASTLLALFAGGDGYRVEEKDGCLTLGWHTRPLIATSAWRVAAP

SEQ ID NO: 1599 - protein, 94 aa, Musa x paradisiaca
ACAEAVQQENLKAADALVKHISVLAASQDGPMRKVAGYFAEAIARRIYRRRPLSQVDRALDSPALEDLLNLHFYESCPYLKFAHFTANQAILEA

SEQ ID NO: 1600 - protein, 259 aa, Poa annua
MGRGRVELKRIENKINRQVTFSKRRNGLLKKAYELSVLCDAEVALIIFSSRGKLYEFGSAGTTKTLERYQHCCYNAQDSNSALSETQSWYQEMSKLKAKFEALQRTQRHLLGEDLGPLSVKELQQLEKQLECSLSQARQRKTQLMVEQVEELRRKERQLGEINRQLKHKLDAEGSSSNNYRAMQQLTWAAGTVVDEGAAAYHMQHQQQQQPNHSAAMDCEPTLQIGYPHQFAAPEQAANNIPRSSGQGGENNFMLGWVL

SEQ ID NO: 1601 - protein, 222 aa, Eupomatia bennettii
RNGLLKKAYELSVLCDAEVALIIFSNRGKLYEFCSSSSSMFKTLERYQKCNYGAPETVVTTREIQSSHQEYLKLKARVEALQRSQRNLLGEDLGPLSGKELDTLERQLDMSLKQIRSTRTQYMLDQLTDLQRREQMLSEANKTLKRRLEEGMEANPNHAWDHNPHAMGFVRQQGPPQDDGFFHPLDCEPTLQIGLCRYQTDQMQMTTAPGPSANNYMPGWLA

SEQ ID NO: 1602 - protein, 249 aa, Sorghum bicolor
MEYGVADDYGYGYGGYDDQQDLPSSSSVDGDEYATVLSAPPKRPAGRTKFRETRHPVYRGVRRRGPAGRWVCEVREPNKKSRIWLGTFATAEAAARAHDVAALALRGRAACLNFADSARLLRVDPATLATPDDIRRAAIQLAEDSSSSTPDASAAAAAVAVASSASVGQATPSSSAYQAGDDATGAAMYGAEYAAAAMYGAGMDFDHSYYYDGMVGGNEWQSAGSSGWHSNVDAGDDEGAGDMSLWSYY

SEQ ID NO: 1603 - protein, 1382 aa, Musa acuminata
MDVPESDCGFVNESELLFHCNQCDRELVRKIAQLLLPGLATACVDNTTGLFKSAASVAVVTRKEMVDYLKQRSQMYVTEAVGQGDDIVNMVEEFSDEPTEIISGFVDDFASSKRNLFSRVSGWLSSESREDKIDDFVQEMETNVFWSIDRREAIAEILIRNVDLKRAFHCSKKFDSAQQLAEHETQCSFRILGCTNEGCKAKFSAIHAEKHDSECPFKVIPCEQKCSERIVRHDMDRHCITICPMKLVNCPFYQVGCHSAFPLCNLEKHCSECLRSHLLYVLQVLHKQEASVEELRRRVQLLEKSHTLSELSEALDVRSLTLVIKEQEAKMKKLERDLKLFVSVAPSFAAAFPVDYDKSSERKVPDGIRSKDLLFSWRNGLRAELGFWRRFGSVALREMRLQRFGTSMDMGPGTDGFATADCGWSGSPIPCDPFALSELVNFDDYIESCSPATIVDQIFTMSFSIVQQTPGVWASPAQDIIAGDTSVAAGTYYSCGEKMASQKANLLLELPSHRPGMDIASRKIGCFDFDDISNEGNSTVPRPFGGVSLPDRMLRALSLLKESSCGGAILAQVWMPIRQGNHYVLSTSEQPFLCDQNLAGYREVSRHFTFSTKDAPGLFLELPGRVFISGRPEWTSNVIYYNRFEYLRVDYAVIHDVRGSLAVPIFDPDGCSCHAVLELVTTIEKPNFDTEMESVSKALQAVNLRSIKAQAHQQSFTKSQISIFSEIHDVSRVICHAHMLPLAITWIPIWCDDGAIYEAKFEKDDIGVMKPTSRRTILCIQKLACYVNDRQMKDFLHACAEHHLEKGQGVAGKALRSNYPFFSPDVRVYDIREYPLAHHARRFDLRAAVAFRLKSTYTGNDDYIVEFFLPINCRGSEEQQLLLSYLSSTMRRIHGSLRTVVDAEIGGSEIMRVGNHNEASLGSSSTAFSMKSSQLMDGNSETTAEMHFGVQNMESNEQSAGAHHEQLKSISMKHTEKKRSTAEKNISFSVLQHYFSGSLKDAANSIGDHFFEHVITVAVCPTTLKRACRQYGILRWPSRKIKKVNRSLQKIQKVIRSVQGVDGALKYDPSTRCLVASVSPPENPPLISSEPKGQDLMPASSSHHSETNHSIGKVEQDYFFHGRNLRGTMLKCETNKLGIPSNDCHRDFTSDGALLPYANMQGALSWPSYSKDASDSSYNSKEAVCQGSKDGLSFMTNECQIMSRNFSFVALHQMAMEVECNDGIIEHSHPSSGMTDSSNGRALNHPSFEKSKALISQIGPLITVKATYNGDTIRFKFLLSMGSHHLFEEIERRFKLLAGTFQLEHMDNDEEWVLLVNDSDLQECINVPNNIGSKTVKLQVRDVPCYIILVVGNQHRNLILRDAAVNPSDCGQVFVGCYVIVV

SEQ ID NO: 1604 - protein, 193 aa, Oryza sativa
MEQRAAAAAQQRQGRRQSAAACGIRRARAETRHPVYRGVRFRAGKWVSEIRELRKPSRIWLGTYATPEMAAAAYDAAALALRGRGAALNFPDAARSRPAPASASADDVRAAATAAAAAMAHQEEDDDSRRQLEDGGGGGGVVDEDDVLEMPRLMVSMAEGLMISPPPVMLGLQADGGGIMDEGGGVVRLWDHS

SEQ ID NO: 1605 - protein, 244 aa, Triticum aestivum
MGRGKVQLKRIENKINRQVTFSKRRSGLLKKAHEISVLCDAEVGLIIFSTKGKLYEFSTESCMDKILERYERYSYAEKVLVSSESEIQGNWCHEYRKLKAKVETIQKCQKHLMGEDLESLNLKELQQLEQQLESSLKHIRSRKNQLMHESISELQKKERSLQEENKVLQKELVEKQKAQAAQQDQTQPQTSSSSSSFMMRDAPPAATTSIHPAASGERAEDAAVQPQAPPRTGLPLWMVSHING

SEQ ID NO: 1606 - protein, 455 aa, Arabidopsis thaliana
MMMNRDILFHQQQQQQMEENMSNLTSASGDQASVSSGNRTETSGSNINQHHQEQCFVPQSSLKRKRNQPGNPDPEAEVMALSPKTLMATNRFICEVCNKGFQRDQNLQLHKRGHNLPWKLKQRSNKDVVRKKVYVCPEPGCVHHHPSRALGDLTGIKKHFFRKHGEKKWKCEKCSKKYAVQSDWKAHAKTCGTKEYKCDCGTLFSRRDSFITHRAFCDALAEESARAMPNPIMIQASNSPHHHHHQTQQNIGFSSSSQNIISNSNLHGPMKQEESQHHYQNIPPWLISSNPNPNGNNGNLFPPVASSVNTGRSSFPHPSPAMSATALLQKAAQMGSTKSTTPEEEERSSRSSYNNLITTTMAAMMTSPPEPGFGFQDYYMMNHQHHGGGEAFNGGFVPGEEKNDVVDDGGGETRDFLGLRSLMSHNEILSFANNLGNCLNTSATAQQQQQHSHQD

SEQ ID NO: 1607 - protein, 269 aa, Pimpinella brachycarpa
MGRQPCCDKLGVKKGPWTADEDNKLINFILTNGQCCWRAVPKLAGLRRCGKSCRLRWTNYLRPDLKRGLLTDAEEQLVIDLHARLGNRWSKIAGRLPGRTDNEIKNHWNTHIKKKLIKMGIDPVTHEPLHKEETNSQKEILLQPFQSPAETENHVPPIPHTNDMASSENSCTPTDQNSSGDESNSLSAICDQIDDSLISYLFEDDTPGLVDAPWENFNKVDMVLPSWDESFPWLLDCQDFGIQDFGFDCFNDIEMNMLTQLDVKNDQTG

SEQ ID NO: 1608 - protein, 324 aa, Zea mays; identical to SEQ ID NO: 106

SEQ ID NO: 1609 - protein, 444 aa, Arabidopsis thaliana
  misc_feature (122)..(122): Xaa can be any naturally occurring amino acid
MSFRGIVQDLRDGFGSLSRRSFDFRLSSLHKGKAQGSSFREYSSSRDLLSPVIVQTSRWANLPPELLFDVIKRLEESESNWPARKHVVACASVCRSWRAMCQEIVLGPEICGKLTFPVSLKXGPRDAMIQCFIKRDKSKLTFHLFLCLSPALLVENGKFLLSAKRTRRTTRTEYIISMDADNISRSSNSYLGKLRSNFLGTKFLVYDTQPPPNTSSSALITDRTSRSRFHSRRVSPKVPSGSYNIAQITYELNVLGTRGPRRMHCIMNSIPISSLEPGGSVPNQPEKLVPAPYSLDDSFRSNISFSKSSFDHRSLDFSSSRFSEMGISCDDNEEEASFRPLILKNKQPRWHEQLQCWCLNFRGRVTVASVKNFQLVAARQPQPQGTGAAAAPTSAPAHPEQDKVILQFGKVGKDMFTMDYRYPLSAFQAFAICLSSFDTKLACE

SEQ ID NO: 1610 - protein, 467 aa, Triticum aestivum
  misc_feature (372)..(372): Xaa can be any naturally occurring amino acid
  misc_feature (380)..(380): Xaa can be any naturally occurring amino acid
  misc_feature (382)..(383): Xaa can be any naturally occurring amino acid
  misc_feature (407)..(407): Xaa can be any naturally occurring amino acid
  misc_feature (410)..(410): Xaa can be any naturally occurring amino acid
  misc_feature (439)..(439): Xaa can be any naturally occurring amino acid
MTLRSIVRDLRESFGNLSRRNFEAKISSVPSLSGHHRGKSLESASDLQDSLVTNLQGNWASLPPELLRDVMKRLEEDDSNWPSRKDVVACASVCTTWREMCKDIVRNPEFCGKLTFPVSLKQPGSRDGLIQCFIKRDKSKLTYRLYLSLTSAVLDDNGKFLLSAKRSRRTTYTDYAISMDPKNISRSSSGYIGKLRSNFLGTKFIIYDTQPPYNASKLCPQERTSRRFSSRKVSPKVPAATGSYPIAQVNYELNVLGTRGPRRMQCTMNSIPTSAVDPDGVVPGQPKELLPRLFEESFRTTASSRYSTDFSSCRFSEFGGGPLREEGGDENAGDKESPLVLKNKSPRWHEQLQCWCLNFRGRVTVASVKNFXLIAAPAPXPXXSGGEAAPEPSSQTQPPQQQPNSAXAQXQPAGSSLSASSSSSHHDTVLLQFGKVSKXFHMDYRYRCRLSGLRICLTSFDTKLACE

SEQ ID NO: 1611 - protein, 338 aa, Triticum aestivum
MYEPKPFPSTGSAHSNPISHDQQIGPTANNAASNIGGNSSNNSFATRQRLRWTDELHGCFLEAVTRLGGPDRATPKGILRTMGVQGLTIYHVKSHLQKYRLAKYIPDPTASGDKLEKKDLGNLLAGIESSPGMETSEVLKLQMEVQKRLHEQLEVQRQLQLRIEAQGKYLQKIMEEQQRLSGVLCESGKPNALALAEEELHHDFSKTEPSTPVLTSEPPFRDNAVTASGDLEGTDELLKALSSHDDCLSLDREFSTPDSSCGAGYLLNSPRDSKRARVSNSLGHGNSEFALPHIIPESSSGSDLQLSSVFSSGTGRSGSSAALDAIEDGFTNGPGSDV

SEQ ID NO: 1612 - protein, 498 aa, Zea mays
LKDLAAIQQHHHQQQLAAAAADENMSNLTSASGDQASVSSHPVPPPAKKKRSLPGNPDPDAEVIALSPRTLMATNRYVCEVCGKGFQRDQNLQLHRRGHNLPWKLKQRNPKEVVRKKVYVCPEPGCVHHDPARALGDLTGIKKHFSRKHGEKKWKCDRCAKRYAVQSDWKAHSKVCGTREYRCDCGTLFSRRDSFITHRAFCDALAEESARAVTAAAAVAGQHHPGQAGMLFSQAAGGGDGGAGLHLPPGVLDPSQTLGGGHAHGMSFQELCLKREQQQQQQFAPSSWLTAQHHQQELELPGSAVFGLARPLDQQEYMGNSTTESTAGLSGFVGFSPSAAGGAAASAHMSATALLQKAAQMGATLSRPSNQGQMAGTHSSSTTNAGTGTANAAAAAASNVPGSGTGAGALGFGSPHHFGAEERTTRPADRDAGNGSGNAAAVAAGGGNEGLTRDFLGLRAFSHGDILSMAGFDPCMSSASPAAYEQGHHHPSSKQWHV

SEQ ID NO: 1613 - protein, 232 aa, Triticum aestivum
  misc_feature (10)..(10): Xaa can be any naturally occurring amino acid
  misc_feature (188)..(188): Xaa can be any naturally occurring amino acid
  misc_feature (190)..(190): Xaa can be any naturally occurring amino acid
GIRHEDINDXEMERNNRVHISSNYGRSHEDCLDNSMKHMQLKPNTVETTYTGQHAASAPLYQMNKTGATGAPDPGTEGSHPDQTSDQAGGANGSMDCIHPTLPVDPKIGSSSTAQPFPHNYAGFAPTMQCHCNQDANRSSLNMSSTFSNMLVSTLLSNPTVHAAARLAASYWPAADSNIPVGPNQEVXLXENAQGRHIGSPPSMASVVAATVAAASAWWATQGLLPLFAPPM

SEQ ID NO: 1614 - protein, 240 aa, Medicago sativa
RGKIQIKRIENTTNRQVIFSKRRNGLLKKAKELAILCDAEVGVMIFSSTAKLYDFASTSLRSVIGRYNKSKEEHNQLGSTASEIKFGQREAAVLRQQLHNLQESHRQIMGEELSGLTVKELQGLENQLEISLRGVRMKKEQLFMDEIQELNRKGDIIHQENVELYRKVYGTKDKNGTNRVLSLTNGVGIGDDSNRTCESPAQPATETRTTTALMHSLEISVLTCKQGKWTQILISYMNGI

SEQ ID NO: 1615 - protein, 270 aa, Triticum aestivum
MEEEGARKAVLFRLFGVEVRGAEEEDDAEPMELKKSTSMPNLACASIGPPLLLPGEASHDKGYASDDGELASTPQLKRRRRKAQERKKGIPWTEEEHRKFLEGLKQLGKGDWRGISKNFVTTRTATQVASHAQKYFLRQTNPGKKKRRASLFDVGIPAGHSYDDQLPSPQSVGTKLAPAEKILHTDRGDVPLPSYPGDIRGNNNNNNMQMQADELTDHVKKRSKFHSGTSLAAMAASGLELAMSSSASSILELSIAPPRCYGAVDAIKVL

SEQ ID NO: 1616 - protein, 197 aa, Medicago truncatula
MVQRNKFRGVRQRQWGSWVSEIRHPLLKRRVWLGTFETAEAAARAYDQAAILMNGKNAKTNFPIPKDQTEDANSLTPNCDDNNNSFHTSNALSHLLKQKLTKCCQKQSQSLTCLRLDADNSHIGVWQKGAGSHSDSNWILRVELGKKHEDSHESNYVSSSEKSAPNNSTIVGDCAEKNGIEHEEDIVTMQMIEELLN

SEQ ID NO: 1617 - protein, 356 aa, Capsicum annuum
MSSNSSLSVVESKLPPGFRFHPRDEELICDYLMKKIDQSPDQQQQYPFLIEVDLNKSEPWEIPEVACVGGKEWYFYSQRDRKYATGLRTNRATVSGYWKATGKDRAVVRKGSLVGMRKTLVFYQGRAPKGRKSDWVMHEFRLEGPLNNNIRPQISSPREDWVLCRVFHKNKELLAAKQGTSSNNIYYDDGTISSSSVPQLMENPYITFDQTQPNNNNINMNELYYEQVPCFSIFTPNQTTFTSHSHHHHHPATSTTTGATPITTAYGGFPADIGNYLNATATSSTCDNKVIKAVLSHLSTKNIIMEGNNNNSNFNNSSAQNIMNIKGGNSPSFGEVSSETSFLSEVAYHPTMWNNY

SEQ ID NO: 1618 - protein, 254 aa, Hyacinthus orientalis
MGEEADRSGYDRLASDGDGDGSGGDGDDGRVLEWEIGLPSADDLTPLSQPLVPPELASAFSITPDPARTILDVHRASHSTMSSLRRHNLASSSSAMKSFSPFPSGDPTVLESDDQKDESRVRRSEAENSEDDQSARSLKRPRLVWTPQLHTRLLTWVAHLGIKTAVPKTIMQLRMSRGLTRENVASHLQKYRLYFEEDAGRCRTNGHRPAIRCSHRRRCLIVCTKICCQLLLRRWPMPYAVPTMIPRARVWECR

SEQ ID NO: 1619 - protein, 227 aa, Zea mays
MARGKVQLRRVENPVHRQVTFCKRRAGLLKKARELSVLCDASVGIIVFSAHGKLYDLATTGTMEELIERYKAASAGEATTDGCGRHNRMDPEHETTVLQQEINLLQKGLRYIYGNRANEHMNVDELNALERYLEIWMYNTRSAKMQIMAQEIQALKSKEGMLKAANEILQEKIVEQSSLLDVGMVVADQQNGRFSTVPLVEEVISSNPLTVLSGYSSCRGSEMGYSF

SEQ ID NO: 1620 - protein, 272 aa, Glycine max
MSSSTQDEISFVLRQFLLRSSVTTHESNDDARNSMSKTALPDGISAYKGSSAANVSSLSVAASENETDDFDCESEEEEVPTPPKSIRSRSSSKRNRVAEVHNLSEKRRRSRINEKLKALQNLIPNSNKTDKASMLDEAIEYLKQLHLKVQMLSMRNGLSLHTMFFQEGLQPLQLSQVPRMDSGEESRLIPSNPTASLPMHQENPMHYLSNLPNKLAMADQQSVPTPSYIINSETSFRLESPIPENIRSFQLRRFPEMCREDILQHQHLNANH

SEQ ID NO: 1621 - protein, 369 aa, Glycine max
MAFHEHLPHEITFQPFAEEQQQQQLGQSRDMQRLLPLSGGAPTWLNNSNAATLRQQNFLHLQPESAATAAQQNDDVRAMDRNRTESNSEADDLAEYKADILGHPLYDQLLSAHVSCLRIATPVDQLPRIDAQLQQSQRVVDKYSGLGNGNGVVDDKELDQFMTHYVILLCAFKEQLQQHVRVHAMEAVMACWELEQSLQSLTGVSPGEGTGATMSDDEYYQAESNANLFEGSMDGADSLSFGPLVPTETERSLMERVRQELKHELKQGYKDKIVDIREEILRKRRAGKLPGDTTSLLKAWWQSHSKWPYPTEEDKARLVQETGLQLKQINNWFINQRKRNWHTNPSSSSGSKSKRKSSGAGETSNQSFM

SEQ ID NO: 1622 - protein, 238 aa, Stylosanthes hamata
MAPREKTPAVKVNGKSNAGVKEVHFRGVRKRPWGRYAAEIRDPGKKSRVWLGTFDTAEDAARAYDAAAREFRGPKAKTNFPFPDSDDINNNNIVVVKNNNRSPSQSSTVESSSRDRDSYSAAAATAVADSSPLDLNLAPQELDSPDPFGSHSTQPFAVFPGGMPAAKQALYLDAVLRASMASHGQFGFGYNRPAAAGAQSDSDSSSVIDLNQNEGDVAKNNGRGLVLDLNEPPPQEMA

SEQ ID NO: 1623 - protein, 254 aa, Brassica rapa subsp. rapa
MGRGRVEMKRIENKINRQVTFSKRRAGLLKKAHEISILCDAEVSLIVFSHKGKLFEYSSESCMEKVLERYERYSYAEKQLKAPDSHVNAQTNWSMEYSRLKAKIELLERNQRHYLGEDLESISIKELQNLEQQLDTSLKHIRSRKNQLMHESLNHLQRKEKEILEENSMLTKQIKERESILRTHQNQSEQQNRSHHVAPQPQPQLNPYMISHQASPFLNMGGMYQGEDPTAVRRNRLDLTLEPIYNCNLGYFAA

SEQ ID NO: 1624 - protein, 420 aa, Zea mays
MCGGAILSGFIPPSGVAAAAAAAKKQQQQQQRCRVTADLLWPGPGSKGAPQDKEEDFEADFREFERGLGEDDVDSAGEGGDPEVQELPPPEPTRFAFATAAKAAVDGVMTPPPKDVQGDRAVKKRGRKNQYRGIRQRPWGKWAAEIRDPNKGVRVWLGTYNTAEEAARAYDAEARKIRGKKAKVNFPDDATGTRHRPTTDEIFNNLKNDDNNNNDDLFAMFAFGDNKKKVPAAKPAAAEGGSGSGSGSFLVPAPAVAVVPGNKRRSSATNTMLSVSDDQRSNSYGSGSSDLVGSWSWDDDAAAAAMTSDYTSSVFAPDNAVLPAASYTQGGAPKRMRSSYGGAPPSLAHDAAMPGFGLDKVSYHHYQALPPYYVGSSNASVGNLGLLQQADDAPAPQDGASAGDIWSLDELLMLAAAGAY

SEQ ID NO: 1625 - protein, 123 aa, Brassica napus
RVGRLQGQAALEAEVTRLKCLLVDIRGRIEGEIGAFPYQKPQPFSYRMQPCNMPCDVDDLYCLQNGNSGEGILMNGLNGCEFDQLQCLGDQNLAGCSNENGTFNVDASGANKSKGGTCAAKAV

SEQ ID NO: 1626 - protein, 213 aa, Oryza sativa
ENSTNRQVTFCKRRAGLLKKARELSILCEADIGIIIFSAHGKLYDLATTGTMEELIERYKSASGEQANACGDQRMDPKQEAMVLKQEINLLQKGLRYIYGNRANEHMTVEELNALERYLEIWMYNIRSAKMQIMIQEIQALKSKEGMLKAANEILQEKIVEQNGLIDVGMMVADQQNGHFSTVPLLEEITNPLTILSGYSTCRGSENGLFLLT

SEQ ID NO: 1627 - protein, 165 aa, Oryza sativa
VRKPYTITKQRERWTEAEHNRFLEALKLYGRAWQRIEEHVGTKTAVQIRSHAQKFFTKLEKEAINNGTSPGQAHDIDIPPPRPKRKPNSPYPRKSCLSSETSTREVQNDKATISNMTNNSTAQMAGDAALEKLQRKEISEKGSCSEVLNLFREVPSASFSSVNKS

SEQ ID NO: 1628 - protein, 358 aa, Medicago truncatula
MWMVGYNEGGEFNMADYPFSGRKLRPLIPRPVPVPTTSPNNTSTITPSLNRIHGGNDLFSQYHHNLQQQASVGDHSKRSELNNNNNPSAAVVVSSRWNPTPEQLRALEELYRRGTRTPSAEQIQQITAQLRKFGKIEGKNVFYWFQNHKARERQKRRRQMESAAAEFDSALEKKDLGASRTVFEVEHTKNWLPSTNSSTSTLHLAEESVSIQRSAAAAKADGWLQFDEAELQQRRNFMERNATWHMMQLTSSCPTASMSTTTTVTTRLMDPKLIKTHELNLFISPHTYKERENAFIHLNTSSTHQNESDQTLQLFPIRNGDHGCTDHHHHHNIIKETQISASAINAPNQFIEFLPLKN

SEQ ID NO: 1629 - protein, 239 aa, Stylosanthes hamata
MAPREKTPAVKVNAGVKEVHFRGVRKRPWGRYAAEIRDPGKKSRVWLGTFDTAEDAARAYDAAAREFRGPKAKTNFPFPDSDDINSNNNNIVVVKNNNRSPSQSSTVESSSRDRDSYSAAAAATAVADSSPLDLNLAPAGAGFAGSIRFPFQQPFAVFPGGMPAAKQALYLDAVLRASMASHGQFGFGYNRPAAAAAGAQSDSDSSSVIDLNQNEGDVAKNNGRGLVLDLNEPPPQEMA

SEQ ID NO: 1630 - protein, 337 aa, Brassica oleracea
MGRSPCCDQDKGVKKGPWMPEEDYKLVAYIDKNGYGKWRSLPNIAGLNRCGKSCRLRWMNYLRPDIRRGEFTEEEESTVVKLHALLGNKWSKIASHLPGRTDNEIKNYWNTHMRKKMLQMGIDPITHEPKTNDLSPILDVSQMLAAAIGNGQFGNNTLFNNNIAVEDLLKLQLIHKMLQIITPKAMPNTNSFNTNSLDTKPVANNIKTNPVNPKPEQAAGQLNAIDPHVFTSQIENEDFMPSFEDAWDCFGDNQLPGLVMVSQENLNYQTGAGMMPDYYGDQLREVPSTGSISVTPETSGLNYPGTTQHSSGSNVQEDWEKFLDDETSDSCWKSFLE

SEQ ID NO: 1631 - protein, 200 aa, Brassica oleracea
MWNPSKVERLEDDDESWEVKAFEQDTKGNISGTTWPPRSYACNFCRREFRSAQALGGHMNVHRRDRASKAHQGPAAAVAARSGGRSRGGKKTFLNSCVLPTATLIIQSTASNNEGLSHFYQLQNPNSMFGHSSDTVNFYGSSSFPSSNLDFSVLNSPVEVPPRFIEYSTGDDESIGSMKETKRTSVGEPDLELRLGHNPP

SEQ ID NO: 1632 - protein, 179 aa, Triticum aestivum
  misc_feature (149)..(149): Xaa can be any naturally occurring amino acid
MESGENNMGSNDGPNSKASLAARQRLRWTDELHEQFVEAVTQLGGPDRATPKGVLRIMGTPGLTIYHVKSHLQKYRLAKYIPDSSADGNKADNKDPGDSLAGLDGSSGMQISEALKLQMEVQKRLHEQLEVQRQLQLRIEAQGKYLKKXIEEHQRFRCRGYKSETPGAGATVTGPAIIP

SEQ ID NO: 1633 - protein, 58 aa, Avena vaviloviana
KGKLPKEARLKLLHWWELHSKWPYPSETEKIALAETTGLDQKQINNWFINQRKRHWKP

SEQ ID NO: 1634 - protein, 217 aa, Cryptomeria japonica
MVRGKVNLQRIQNPVNRRVTFSKRKAGLLKKAGELSVLCEAEICSIIFSPTGKLFEFASHSMNRIIGKYKKNCASIGHHIQLQEHLETLRMELENLRIETTHLEKTCKHMNGEDLDFLNFKELQKLEKKMSLSARKIHLRKDKILVENVGSLKSKEKLLELENAEMDKKIGRSHKACHLNINMMDEVNSKLETEASTRQDCLKLTLISRNFHDDNFC

SEQ ID NO: 1635 - protein, 262 aa, Triticum aestivum
  misc_feature (33)..(33): Xaa can be any naturally occurring amino acid
MHRLRRPRVNQDMNRGHISSSELIDAKLEEHRXSTARHCPNCRHKLDCKPKDWLGLPAGVKFDPTDQELIEHLEAKVREEGSRSHPLIDEFIPTIDGEDGICYTHPEKLPGVTMDGLSKHFFHRPSKAYTTGTRKRRKIQTECDVHKGETRWHKTGKTRPVMANGRQKGCKKILVLYTNFGKHRKPEKTNWVMHQYHLGDLEEEKEGELVVCKIFYQTQPRQCSWSASSDRGGAGGAVAIAAAAAVTVQEQRMRDSGSGSSS

SEQ ID NO: 1636 - protein, 186 aa, Triticum aestivum
MEDGRALRRMSIPTRRSRSADFHNFSERRRRDKINEKLKALQELLPNCTKTDKVSMLDEAIDYLKSLQLQLQMLVMGKGMAPVVPPELQQYMHYITTDPAAQPMQMPPSEPPRPFQITHANPPQRESDFLSQMQNHLHPSDQPQINFLRPPKLQLYTPEQRGVVGSSSGHNGGWIPERNSSYNFME

SEQ ID NO: 1637 - protein, 399 aa, Oryza sativa
MCGGAIISGFIPPSAAAAAAAAAAAAKKQQGRRVTADVLWPGMLRKGKAGAAEEDFEADFREFERGMSDDEAEGGGGEEEEEEEDDVVVEVPPPATARFVVRAAAKAAPPTADGMLTTKLVQHDGPTARSAKRKRKNQYRGIRQRPWGKWAAEIRDPSKGVRVWLGTYNTAEEAARAYDAEARKIRGKKAKVNFPDEPAVAQKLSLKQNAAKQEKLAPPLKSCGDDAFFQLNSSDNDLFAMLAKVPAKPAEPVDLMPPVKPLASTETFEMNMLSDTSSNSFGSSDFGWEDDTLTPDYTSVFVPNAAMPAYGEPAYLTGGAPKRMRNNYGIAVPQGNGMPNLAQNMPTFDPEMKYLPLPYVESSSDESMDNLLQNDATQDGASNEGIWSLDELLMAAGAY

SEQ ID NO: 1638 - protein, 143 aa, Medicago truncatula
MDGSWGEGKRIYEYREENEYEVEVEIEEEEDVSYGDDEKRKRVVTDHLYNKKGSKAGGSVTPSCQVDNCNADLSAAKQYHKRHKVCENHSKAHSVLISELQQRFCQQCSRFHEVSEFDDLKRSCRRRLAGHNERRRKSASEYH

SEQ ID NO: 1639 - protein, 572 aa, Brassica napus
MKRDLHQFQGPNHGTSIAGSSTSSPAVFGKDKMMMVKEEEDDELLGVLGYKVRSSEMAEVALKLEQLETMMGNAQEDGLAHLATDTVHYNPAELYSWLDNMLTELNPPAATTGSNALNPEINNNNNNSFFTGGDLKAIPGNAVCRRSNQFAFAVDSSSNKRLKPSSSPDSMVTSPSPAGVIGTTVTTVTESTRPLILVDSQDNGVRLVHALMACAEAVQSSNLTLAEALVKQIGFLAVSQAGAMRKVATYFAEALARRIYRLSPPQTQIDHSLSDTLQMHFYETCPYLKFAHFTANQAILEAFEGKKRVHVIDFSMNQGLQWPALMQALALREGGPPSFRLTGIGPPAADNSDHLHEVGCKLAQLAEAIHVEFEYRGFVANSLADLDASMLELRPSETEAVAVNSVFELHKLLGRTGGIEKVFGVVKQIKPVIFTVVEQESNHNGPVFLDRFTESLHYYSTLFDSLEGAPSSQDKVMSEVYLGKQICNLVACEGPDRVERHETLSQWSNRFGSSGFAPAHLGSNAFKQASTLLALFNGGEGYRVEENNGCLMLSWHTRPLITTSAWKLSAVH

SEQ ID NO: 1640 - protein, 200 aa, Salvia miltiorrhiza
MADSPGGHGSHDNGGGGDHSPQSSVREQDRFLPIANIGRIMKKGLPQNGKIAKDAKDTVQECVSEFISFVTSEASDKCQKEKRKTINGDDLLWAMATLGFEDYIAPLKVYLARYRELEGDTKGSARGADGAPKRDTVGTQLGSDASLLIKALLLKASATLTPKSNIKKHNVVWLSTAHFWLSLSQDTMFSCYSFKWLGFL

SEQ ID NO: 1641 - protein, 152 aa, Brassica napus
  misc_feature (5)..(5): Xaa can be any naturally occurring amino acid
  misc_feature (14)..(14): Xaa can be any naturally occurring amino acid
  misc_feature (22)..(22): Xaa can be any naturally occurring amino acid
  misc_feature (30)..(30): Xaa can be any naturally occurring amino acid
  misc_feature (52)..(53): Xaa can be any naturally occurring amino acid
  misc_feature (96)..(96): Xaa can be any naturally occurring amino acid
  misc_feature (102)..(102): Xaa can be any naturally occurring amino acid
ETRWXKTGKTRPVXTGGRVKGXKKILVLYXNYGKQKKPEKTNWVMHQYHLGXXEEEKEGELVVSKIFYQTQPRQCGGSLAAAATAKERPYLHGHHXGGGGSXHLYHNNGNVKGNGGGGSARASEYYNNIPTIISFNQSGIQNHLVHGTQPLP

SEQ ID NO: 1642 - protein, 281 aa, Oryza sativa
  misc_feature (56)..(56): Xaa can be any naturally occurring amino acid
  misc_feature (256)..(256): Xaa can be any naturally occurring amino acid
ERDSISNGAGKDAKDINDHSHENCLDTSSQQFKPKSNSVETTYVDWSAAKASHYRXQMDRNGVTGFQATGTEGSHPDQTSDQMGGASGTMNQCIHPTLPVDPKFDGNAAAQPFPHNYAAFAPMMQCHGNQDAYRSFANMSSTFSSMLVSTLLSNPAIHAAARLAASYWPTVDGNTPDPNQENLSESAQGSHAGSPPNMASIVAATVAAASAWWATQGLLPLFPPPIAFPFVPAPSAPFYKGDVQRAQEKDIDWAMXNGQKGLGKIWEQDNLKHEVQCLEND

SEQ ID NO: 1643 - protein, 210 aa, Eucalyptus grandis
MVRGKIQLRRIENTTSRQVTFSKRRNGLLKKAYELSVLCDAEVAVIIFSQKGRLYEFSSNSEIQKTIDRYRRSTYDMDTYKTNLDQCILHLKQETTDMERKIELLEVSLRKLSGECLGSCSIDEIQMIGDQLERSLSSIRARKAQLFDDQIQHLQAKERSLKEENAKLLAKCLANPGQSTAHPRAAALHSRSSRSTDVETGLFIGLPELN

SEQ ID NO: 1644 - protein, 375 aa, Arabidopsis thaliana
MCGGAIISDFIPPPRSLRVTNEFIWPDLKNKVKASKKRSNKRSDFFDLDDDFEADFQGFKDDSAFDCEDDDDVFVNVKPFVFTATTKPVASAFVSTVGSAYAKKTVESAEQAEKSSKRKRKNQYRGIRQRPWGKWAAEIRDPRKGSREWLGTFDTAEEAARAYDAAARRIRGTKAKVNFPEEKNPSVVSQKRPSAKTNNLQKSVAKPNKSVTLVQQPTHLSQQYCNNSFDNSFGDMSFMEEKPQMYNNQFGLTNSFDAGGNNGYQYFSSDQGSNSFDCSEFGWSDHGPKTPEISSMLVNNNEASFVEETNAAKKLKPNSDESDDLMAYLDNALWDTPLEVEAMLGADAGAVTQEEENPVELWSLDEINFMLEGDF

SEQ ID NO: 1645 - protein, 662 aa, Arabidopsis thaliana
MEEVSSEMEVEVQNRQLSDSSPAQNVKKFGLKNSIQTNFGSDYVFQIVPKIDWTAIAVSLSTNTVKLYSPVTGQYYGECKGHSDTVNQIAFSSDSAASPHVLHSCSSDGTIRSWDTRSFQQVSRIDTGNDQEIFSFSYGGAADNLLAGGCKEQREHNHRESSAGEGGSSSMTTVIKEEAAGVDELLVVLGYKVRSSDMADVAHKLEQLEMVLGDGISNLSDETVHYNPSDLSGWVESMLSDLDPTRIQEKPDSEYDLRAIPGSAVYPRDEHVTRRSKRTEIESELSSTRSVVVLDSQETGVRLVHALLACAEAVQQNNLKLADALVKHVGLLASSQAGAMRKVATYFAEGLARRIYRIYPRDDVASSSFSDTLQIHFYESCPYLKFAHFTANQAILEVFATAEKVHVIDLGLNHGLQWPALIQALALRPNGPPDFRLTGIGYSLTDIQEVGWKLGQLASTIGVNFEFKSIALNNLSDLKPEMLDIRPGLESVAVNSVFELHRLLAHPGSIDKFLSTIKSIRPDIMTVVEQEANHNGTVFLDRFTESLHYYSSLFDSLEGPPSQDRVMSELFLGRQILNLVACEGEDRVERHETLNQWRNRFGLGGFKPVSIGSNAYKQASMLLALYAGADGYNVEENEGCLLLGWQTRPLIATSAWRINRVE

SEQ ID NO: 1646 - protein, 265 aa, Oryza sativa
MEQHEEAAERKPSPPVIFRLFGVEVRGGGGGVDEEEYEEEEVEGGLFIKKSSSMPNLTSIDPLPVPADGGKRRASDDSELASGQQKRRRRKVQERKKGVPWTEEEHKKFLEGLRQLGKGDWRGISKNFVTSRTATQVASHAQKYFLRQTNPGKKKRRASLFDVVAECSDDQLPSPQSVGTKPPTQDIIHTDRGDVPILSYPVARGFRGDSVQVDELTEYVKRLKAAEDMSLSMISGLEMASSSISSLELSIAPPHCAIEAAIKVL

SEQ ID NO: 1647 - protein, 305 aa, Glycine max
MEVAVAKALKPSLRREFIVQQMLCEDIFSLNANTVAAGEDFSVDDLFDFSNGSLHNEQQQEYDEGKQSLSASEDRGEDDCNSNSTGVSYDSLFSTELAVPAGDLEDLEWVSHFVDDSLPELSLLYPVRSEEANRFVEPEPSAKKTPCFPWEMKITTKARTVRNRKPSNSRMWSLGSPLLSLPSSPSSPSSCSSSVREPPAKKQKKQAQAQPVGAQIQRRCSHCHVQKTPQWRTGPLGAKTLCNACGVRYKSGRLFSEYRPACSPTFCSDIHSNSHRKVLEIRKRKEVAQPDTGLAQAQTQMVPTC

SEQ ID NO: 1648 - protein, 233 aa, Musa acuminata
RIENKINRQVTFSKRRNGLLKKAYELSVLCDAEVALIIFSSRGKLYEFGSVRMSKTLERYQHWCYASQDPNVVNRDNAQNWCQEMSKLKAKFESLQRSQRHLLGEDLGPLSVKELQQLERQLESALSQARQRKSQLILEQMEELRKKERHLGEINKQLRDQIEVEGATLKAFQGSWCSDAMIGSNAFAAQPSHSAGMDREPMLRIGYHQFVPADAAIPRNPIGENNFMLEWVP

SEQ ID NO: 1649 - protein, 440 aa, Oryza sativa
MSFRSIVRDVRDGFGSLSRRGFEVRILGHRRGKSHGAVHELHDPVPVIQSSCWASLPPELLRDIIERLEESEATWPSRKHVVACAGVCRTWREMCKEIVKNPELCGKITFPISLRQPGPRDGTMQCFIRRDKSTQTYYLYLSLGSAVLVDNGKFLLSAKRNWHATCTEYVISMNANNLSRSTNTNIGKLRSNFLGTKFVIYDTHTPYNATSDSQSGKTSRRFSNKGTAKHPCSTYSIANISYELNVFGTRGPRRMCCLMHSIPASSLEAGGTVPSQPDSILAHSLNESSFRSVSFSKSSVMDHSMHFSSAQFSDISIGDGPRIGGRVLSDDEECKETPLILQNKAPRWHEQLQCWCLNFRGRVTVASVKNFQLIAATQPAAGAPTPSQPVPPPPPEHDKVILQFGKVAKDMFTMDYHYPLSAFQAFAISLSSFDTKLACE

SEQ ID NO: 1650 - protein, 486 aa, Oryza sativa
MAIAAAAAGGAGFRAAQAPAPLLDEDWYFDAAGGGGGGAHGSMMLGLSSVHGGIGAGTSGGGHGQQFSLLNMGAAAAPFDVSGFDLGIACGGVGGGGDVVSFLGGGNASNTALLPVGNAGFLGTFGGFGTAASQTPEFGGLAGFDMFDAGAVNTGGSSSSSSAAAAAASASAHVSNTAPFSGRGKAAVLRPLDIVPPVGAQPTLFQKRALRRNAGEDDDDKKRKAAAGAGAGALSADGADMVLDDGDDDGLSIDASGGLNYDSEDARGGEDSGAKKESNANSTVTGDGKGKKKGMPAKNLMAERRRRKKLNDRLYMLRSVVPKISKMDRASILGDAIEYLKELLQKINDLQNELESSPATSSLPPTPTSFHPLTPTLPTLPSRIKEEICPSALPSPTGQQPRVEVRLREGRAVNIHMFCARRPGLLLSAMRAVEGLGLDVQQAVISCFNGFTLDIFKAEQCKDGPGLLPEEIKAVLMQSAGLHTMI

SEQ ID NO: 1651 - protein, 129 aa, Brassica napus
MARPQQRFRGVRQRHWGSWVSEIRHPLLKTRIWLGTFETAEDAARAYDEAARLMCGPRARTNFPYNPNAVPSSSSKLLSATLTAKLHKCYMASLQLTKQTQTQSQAQAQNPRLRSLSLPDTDSVMNMTA

SEQ ID NO: 1652 - protein, 252 aa, Gnetum parvifolium
MGRGRVQLRRIENKINRQVTFSKRRNGLLKKAYELSVLCDAEVALIIFSTRGKLYEFASSSMSKTLERYEKCSYSMQENASTDRDAQNWHHEVTKLKAKLESLHKAQRNLMGEDLGPLNIKELQSLEQQLEVALGHVRNRKTQLLIQTIDELRDKERTLQEVNKSLQKKLSETEGRNVIPALPHATTGSGEWESSTLTTTYALQTQQPSGIHHVDCEPTLHIGPYHQAVHHEAIPGPPATHSEPHNQYIWWV

SEQ ID NO: 1653 - protein, 195 aa, Glycine max
MAKEGLGLEITELRLGLPDAEHQVSVVNKKNEKKRAFSEIDDGVGDENSSSGGGDRKMETNKSQVVGWPPVCSYRKKNSMNEGASKMYVKVSMDGAPFLRKIDLGLHKGYSDLALALDKLFGCYGMVEALKNADNSEHVPIYEDKDGDWMLVGDVPWEMFMESCKRLRIMKKSDAKGFGLQPKGSLKGFIESAAK

SEQ ID NO: 1654 - protein, 156 aa, Pisum sativum
KNEKKRMFSEIDGGVEENGGSGDRKSVDKKNQVVGWPPVCSYRKKNMNEGSKMYMKVSMDGAPYLRKIDLCLHKGYLELALALEKLFDCCGIEEALKDAENCEHVPIYEDKDGDWMLVGDVPWEMFIESCKRLRIMKRSDAKGFDLQPKGSLKRFI

SEQ ID NO: 1655 - protein, 234 aa, Nicotiana tabacum
LPLPFFNMDTSHWPQGIGLAKAVEPSKPVPVTERKPRPQKEQAINCPRCNSTNTKFCYYNNYSLSQPRYFCKTCRRYWTDGGSLRNVPVGGGSRKNKRSNSSSNNSSSSTSSSYKKIPDLTIPTSSSTQNPKIINEPHDLNLTFNPSTTSNFSNISEFMALPLMNPNSTTSFMSSIMPQISDSNNIMYSSSSTGLPNLHDLKPTLNFSLDGFDNNNGYGSLQGETAGAKLFFPL

SEQ ID NO: 1656 - protein, 937 aa, Oryza sativa
MEVDPSSSLPGAGEGGGGGIGGGGGDLWPFDSLTTSLLFSSVSASPQPLPASSSWLTPPSPLWLFDERQLLPLDMGAPAAPATAPPAEAAAVVEEVHRTRSGNSDTTSKRVDQINSKWQFHLSIDDNTDSSCLFKERLTQALRYFKESTDQHLLVQVWAPVKSGDRYVLTTSGQPFVLDQQSIGLLQYRAVSMMYMFSVDGENAGELGLPGRVYKQKVPEWTPNVQYYSSTEYPRLNHAISYNVHGTVALPVFDPSVQNCIAVVELIMTSKKINYAGEVDKVCKALEAVNLKSTEILDHPNVQICNEGRQSALVEILEILTVVCEEHKLPLAQTWVPCKYRSVLAHGGGVKKSCLSFDGSCMGEVCMSTSDVAFHVIDAHMWGFRDACVEHHLQKGQGVSGKAFIYRRPCFSKDISQFCKLEYPLVHYARMFGLAGCFAICLQSMYTGDDDYILEFFLPPNCRNEDDQNALLESILARMKKCLRTLKVVGNGDTNEVCLQISNVLIIETEDLKTNVHFENSEGCFRESPESNGSQRVHEVDNDGNKVSIMSERHLLADDNSQNNGASVGRPNGSGASDSLHKSNKPPERRRGKAEKTISLDVLQQYFSGSLKNAAKSLGVCPTTMKRICRQHGISRWPSRKINKVNRSLSKLKQVIESVQGSDAAFNLTSITGPLPIPVGPSSDSQNLEKASPNKVAELSNLAVEGDRDSSLQKPIENDNLAILMSQQGFIDANNNLQLEADKASHSRSSSGEGSINSRTSEASCHGSPANQTFVCKPIASTFAEPQLIPEAFTKEPFQEPALPLSRMLIEDSGSSKDLKNLFTSAVDQPFLARSSNLALMQNSGTVTIKASFKEDIVRFRFPCSGSVTALKDEVAKRLRMDVGMFDIKYLDDDHEWVKLACNADLEECMEISGSHVIRLLVSDVAAHLGSSCGSSG

SEQ ID NO: 1657 - protein, 374 aa, Arabidopsis thaliana
MCGGAIISDFIPPPRSLRVTNEFIWPDLKNKVKASKKRSNKRSDFFDLDDDFEADFQGFKDDSAFDCEDDDDVFVNVKPFVFTATTKPVASAFVSTGSAYAKKTVESAEQAEKSSKRKRKNQYRGIRQRPWGKWAAEIRDPRKGSREWLGTFDTAEEAARAYDAAARRIRGTKAKVNFPEEKNPSVVSQKRPSAKTNNLQKSVAKPNKSVTLVQQPTHLSQQYCNNSFDNSFGDMSFMEEKPQMYNNQFGLTNSFDAGGNNGYQYFSSDQGSNSFDCSEFGWSDHGPKTPEISSMLVNNNEASFVEETNAAKKLKPNSDESDDLMAYLDNALWDTPLEVEAMLGADAGAVTQEEENPVELWSLDEINFMLEGDF

SEQ ID NO: 1658 - protein, 171 aa, Glycine max
MADGPASPGGGSHESGDHSPRSNVREQDRYLPIANISRIMKKALPANGKIAKDAKETVQECVSEFISFITSEASDKCQREKRKTINGDDLLWAMATLGFEDYMDPLKIYLTRYREMEGDTKGSAKGGDSSAKRDVQPSPNAQLAHQGSFSQNVTYPNSQGRHMMVPMQGPE

SEQ ID NO: 1659 - protein, 417 aa, Oryza sativa (japonica cultivar-group)
MEMASGGGAAAAAGGGVGGSGGGGGGGDEHRQLHGLKFGKKIYFEDAAAAAGGGGTGSGSGSASAAPPSSSSKAAGGGRGGGGKNKGKGVAAAAPPPPPPPPRCQVEGCGADLSGIKNYYCRHKVCFMHSKAPRVVVAGLEQRFCQQCSRFHLLPEFDQGKRSCRRRLAGHNERRRRPQTPLASRYGRLAASVGEHRRFRSFTLDFSYPRVPSSVRNAWPAIQPGDRISGGIQWHRNVAPHGHSSAVAGYGANTYSGQGSSSSGPPVFAGPNLPPGGCLAGVGAATDSSCALSLLSTQPWDTTTHSAAASHNQAAAMSTTTSFDGNPVAPSAMAGSYMAPSPWTGSRGHEGGGRSVAHQLPHEVSLDEVHPGPSHHAHFSGELELALQGNGPAPAPRIDPGSGSTFDQTSNTMDWSL

SEQ ID NO: 1660 - protein, 258 aa, Jatropha curcas
MESKNRKWLQERSNSTGNNLNQNSNTAETRYRGVRKRPWGRYAAEIRDPGKKTRVWLGTFDTAEEAARAYDAAAREFRGSKAKTNFPTVTELNNAAAAAVAAGAVTVARSPSQSSTVESSSPTPPRAASPPPPLDLTLNIPSHQHHHLRHGHFPTGVIFPGGAWISLAAEAHPVFFFDAFSVQGESNNNNKNNIINNNKIHSKNINLCRLDRTVMVSSGVHSDSDSSSVVVDYDHDRSPCNKGLSLDLDLNFPPAEVA

SEQ ID NO: 1661 - protein, 603 aa, Oryza sativa
MEINSSGEEAVVKVRKPYTITKQRERWTEAEHNRFLEALKLYGRAWQRIEEHVGTKTAVQIRSHAQKFFTKLEKEAINNGTSPGQAHDIDIPPPRPKRKPNSPYPRKSCLSSETSTREVQNDKATISNMTNNSTAQMAGDAALEKLQRKEISEKGSCSEVLNLFREVPSASFSSVNKSSSNHGASRGLEPTKTEVKDVVILERDSISNGAGKDAKDINDQEMERLNGIHISSKPDHSHENCLDTSSQQFKPKSNSVETTYVDWSAAKASHYQMDRNGVTGFQATGTEGSHPDQTSDQMGGASGTMNQCIHPTLPVDPKFDGNAAAQPFPHNYAAFAPMMQCHCNQDAYRSFANMSSTFSSMLVSTLLSNPAIHAAARLAASYWPTVDGNTPDPNQENLSESAQGSHAGSPPNMASIVTATVAAASAWWATQGLLPLFPPPIAFPFVPAPSAPFSTADVQRAQEKDIDCPMDNAQKELQETRKQDNSEAMKVIVSSETDESGKGEVSLHTELKISPADKADTKPAAGAETSDVFGNKKKQDRSSCGSNTPSSSDIEADNAPENQEKANDKAKQASCSNSSAGDNNHRRFRSSASTSDSWKEVSE

SEQ ID NO: 1662 - protein, 203 aa, Glycine max
  misc_feature (98)..(98): Xaa can be any naturally occurring amino acid
MADGPASPGGGSHESGDHSPRSNVREQDRYLPIANISRIMKKALPANGKIAKDAKETVQECVSEFISFITSELVCFFFSSDSFLLRFSYLSSPAFNLXFLEFCRASDKCQREKRKTINGDDLLWAMATLGFEDYMDPLKIYLTRYREMEGDTKGSAKGGDSSAKRDVQPSPNAQLAHQGSFSQNVTYPNSQGRHMMVPMQGPE

SEQ ID NO: 1663 - protein, 224 aa, Glycine max
MWNPRDQYHHQDQDQDESWEVRAFAEDTSNIMGTTWPPRSYSCTFCRKEFRSAQALGGHMNVHRRDRARLHQASVPHNNPSFSPTPSFLNISHQEPFVANGGLCLLYPFPSPNNNAPFSSLGHNNNACGDSPSTAFSVSSSHSLQYPPMRVPSCSASTSFDFSVAQPAPPAVGRNNNGFSSSYSGKVEQEPPTNDSSTHHGHGRHHHDEELDLELRLGNKSTST

SEQ ID NO: 1664 - protein, 258 aa, Brassica napus
  misc_feature (143)..(143): Xaa can be any naturally occurring amino acid
  misc_feature (221)..(221): Xaa can be any naturally occurring amino acid
VDPASGSRTAGEQNTALQDKNMASKSPSSSSDDSEETGVTKLNNAGSKTNGDKEEVVAAALHDPNASPKKKLVDRSSCGSNTPSGSDAETDALDKMEKDNEDVKEADPNQPSVIELSNRRSKIRDNNNNNNQTTDSWKEVSQXGRKAFQALFARQRLPQSFPPPQGGAENVKGKQSDTSMPMAPDPNKVQDSCDADQESGVVMIGDGTGKSLKTRQSGFKXPYKRCSMGAKESQDGNANHESDEKVCKRIRLEGEAST

SEQ ID NO: 1665 - protein, 215 aa, Glycine max
WPGLFHILASRPGGAPYVRLTGLGTSMEALEATGKRLSDFANKLGLPFEFFPVAEKVGNLDPERLNVCKTEAVAVHWLQHSLYDVTGSDTNTLWLLQRLAPKVVTVVEQDLSNTGSFLGRFVEAIHYYSALFDSLGSSYGEESEERHVVEQQLLSREIRNVLAVGGPSRTGEPKFHNWREKLQQCGFRGISLAGNAATQASLLLGMFPSEGYTLV

SEQ ID NO: 1666 - protein, 372 aa, Hordeum vulgare
MTVDRKGAQAAAAAAATSAPFEIPALQPGRKKRPRRSRDGPNSVSETIKRWKEVNQQLEHDPQGAKRARKPPAKGSKKGCMQGKGGPENTQCGFRGVRQRTWGKWVAEIREPNRVSRLWLGTFPTAEVAAQAYDEAARAMYGPLARTNFPVQDAQAAPAVAVPVATEGVVRGSSASCESTTTSNHSDVASSSHNKQRQIQAPEISSRSDLLESTQSVEYSQQQSVPDAVSSIAMSTSEEDVYEPLEPISNLPDGEADCFDIEELLKLMEADPVEVDPVTVGSWNEFQDAGANARGSWNEFQCARANTGVSWNANAGMEMGQQEPLYLDGLDQGMLEGMLHSDYPFPVWISEDRPMHNPAFHDAEMSEFFEGL

SEQ ID NO: 1667 - protein, 121 aa, Triticum aestivum
HEPPQGRMAFDKLFSRGKLPQSFSPPQAEGLKVVPRGEQDEATTVTVDLNKSAAVIDHELDTLVGPRAATFPIELSHLNMKSRRTGFKPYKRCSVEAKENRVPAADEVGTKRIRLDSEPST

SEQ ID NO: 1668 - protein, 220 aa, Vitis aestivalis
MAPRDKPTGVTAGATGNKEIRYRGVRKRPWGRYAAEIRDPGKKSRVWLGTFDTAEEAARAYDAAAREFRGAKAKTNFPSPTDLAAAAATTANRSPSQSSTVESSSREALSPGAIAGPPALDLNLSHPAAAGQFSAVRYPAVGVFPIAQPLFFFEPFSRPEKPKTHRDMFDLDRAVADFHPAIAGSVHSDSDSSSVVDFNYHDRSTRLLNLDLNHPPAEVA

SEQ ID NO: 1669 - protein, 533 aa, Arabidopsis thaliana
MKRDHHHHHHQDKKTMMMNEEDDGNGMDELLAVLGYKVRSSEMADVAQKLEQLEVMMSNVQEDDLSQLATETVHYNPAELYTWLDSMLTDLNPPSSNAEYDLKAIPGDAILNQFAIDSASSSNQGGGGDTYTTNKRLKCSNGVVETTTATAESTRHVVLVDSQENGVRLVHALLACAEAVQKENLTVAEALVKQIGFLAVSQIGAMRKVATYFAEALARRIYRLSPSQSPIDHSLSDTLQMHFYETCPYLKFAHFTANQAILEAFQGKKRVHVIDFSMSQGLQWPALMQALALRPGGPPVFRLTGIGPPAPDNFDYLHEVGCKLAHLAEAIHVEFEYRGFVANTLADLDASMLELRPSEIESVAVNSVFELHKLLGRPGAIDKVLGVVNQIKPEIFTVVEQESNHNSPIFLDRFTESLHYYSTLFDSLEGVPSGQDKVMSEVYLGKQICNVVACDGPDRVERHETLSQWRNRFGSAGFAAAHIGSNAFKQASMLLALFNGGEGYRVEESDGCLMLGWHTRPLIATSAWKLSTN

SEQ ID NO: 1670 - protein, 238 aa, Nicotiana tabacum
VKPMEEIIPKNTNTITTICSSKPSTHIERKIRPHQKDQALNCPRCNSTNTKFCYYNNYSLSQPRYFCKTCKRYWTEGGSLRSIPIGGGSRKSKKSSSTNCSSSNTVLREFSKNVVAPVLDPPKMEGSQDLNLGFSCDFKTISELIQVPNNSFMPMPISDPNSVYSSLNFSLDYGLGISGDYENNLQDVQDSTTSGRLLFPFEDLKQISNTSIDCAEENRDGESNGYWNAVLGGNGGSW

SEQ ID NO: 1671 - protein, 241 aa, Theobroma cacao
MVYPNESCETSPQKKMGRGKIEIKRIENTTNRQVTFCKRRNGLLKKAYELSVLCDAEVALIVFSSRGRLYEYANNSVKATIERYKKTCADSSNTGSVSEANAQFYQQEAAKLRVQIGNLQNSNRHMLGESLSALPMKDLRSLENRLEKGISRIRSKKNELLFAEIEYMQKREIDLHNNNQLLRAKIAENERKQQNINLMPGGSNFEIMHSQPFDSRNYFQVNALQPANHYPHQDQMALQLV

SEQ ID NO: 1672 - protein, 114 aa, Nicotiana tabacum
MDTAQWPQEIVVKGMEEIIPKSINTITTICSSKPSTHVERKIRPHQKDQALNCPRCNSTNTKFCYYNNYSLSQPRYFCKTCKRYWTEGGSLRSIPVGGGSRKSKKSSSTNSSSS

SEQ ID NO: 1673 - protein, 116 aa, Brassica napus
MSCEGKDHEEEDEAILPGFRFHPTDEELLGYYLRRKVENKPIKLELIKQIDIYKFDPWDLPRVSSVGEKEWYFFCMRGRKYKNSVRPNRVTGSGFWKATGIDKPVYSNFNCIGLKK

SEQ ID NO: 1674 - protein, 157 aa, Brassica napus
MLNPGQGRGPDSGVAGGSSNSDPFPAGLRVLVVDDDPTCLMILERMLRTCLYRVTKCNRAEIALSLLRKNKNGFDIVISDVHMPDMDGFKLLEHVGLEMDLPVIMMSADDSKSVVLKGVTHGAVDYLIKPVRIEALKNIWQHVVRKKANEWNVSEHS

SEQ ID NO: 1675 - protein, 517 aa, Arabidopsis thaliana
MAHQHFFKPLLPGFHASLTIPVAFFLKYIEGRYEQKTAKLRSDASKRTWEVKIDGQRLTDGWKEFAVSHDLRIGDIVVFRQESDLAFHVTLLGPSCCGIQYGSCSVEKNNLGDEKKKVKENPNGEAESSSRDPSCFVANVAPSSLRYDLMRFPRGFVRDNGVVGSGEIVLMNEKGRSWNFNLRQKPSNGTVYVRGGWVSFCDANGLKAGDNYTFKLIKRAGTLVLRLLPNEPKEEANEVSLPEEPESDAERNLEKIQRKEKVKKNVTREAESSSQDPSCFVANVSPSSLRYDTLYLPKRFMRENGVDKRCGEMILINEKGKSWTLDLKVKKSSGTSLIKRGWRSFCSANGLRAGSIITLKLIKKRATLVLRLIPNEPEEANEVVSLSTEQESDEESIHDEKISRRKSLLSENRFVTLTLTPYTIQSSLLRLPVPFTRMNGINEETKMTLLDKHGVKWLTTLRFEDDKRKRLGMVGGWKGFIQANGVKANESIMLELIWEEETSCVLKFCSKVKLAIK

SEQ ID NO: 1676 - protein, 213 aa, Zea mays
MEDGSAPRRATPAPTRRSRSADFHNFSERRRRDRINEKLRALQELLPNCTKTDKASMLDEAIDYLKSLQLQLQMLVMGKGGGMAPVVPPELQQYMHYITADPAHQMMPPPLRPSAGQLQPAAGRQFQITHQAAAANNDNDPQRRRQSNVESDFLSQMQNLHPSDQPPHHHNFLRPPRLQLFTPEQRGGGGGLPNTSHNAGWISGRSSSYNFME

SEQ ID NO: 1677 - protein, 218 aa, Rosa rugosa
NGLLKKAYELSILCDAEVALIIFSNRGKLYEFCSSSSILKTLERYQKCSYGAMEVNEPAKELEQSSYREYLKLKTRCESLQRTQRNLLGEDLGPLNTKELEQLERQLESSLKHVRSTKTQYMLDQLSDLQSKEHMLIEANRDLTMKLDEINSGTQLRQTWERGHAHQTMLYGTQHAQTQGLMFQPLDCNPTLQIGYNAVGSQQMTAATPAPTQPVNGF

SEQ ID NO: 1678 - protein, 314 aa, Sulfitobacter sp. EE-36
MKILAVDDDPFILELLPAMFEQADLNDLHTAPSGPAALDMIKAQKVPFDCMLLDVDMPEMDGIELCRRIRTVPGYEDKPILMLTAKTDSISIEKAFAAGANDYIAKPFNLKDIYNRIRVAERLLVSSKTIKRIDASDLSKEGTQVAEDITLADKVFLANVGRLILSFSLGNYITQLDRSELDNYQVFGVSIDDAERIFEETSQQGFLHILTSVAETLTDLITCPHLLMSYEGNGAFLCITRDPNLPEWDRMEAGLQAKLDALNLLSDDLTADSISLSVGTPIAPNANRTQRVKKTFERALSRAEMRYASKCAAA

SEQ ID NO: 1679 - protein, 227 aa, Houttuynia cordata
ENKINRQVTFSKRRNGLLKKAYELSILCDAEIALIIFSSRGKLYEFGSSGLTKTLERYQRCSYVPQENNPADREAQVWHQEISKLKAKYELLLRSQRHLLGEDLGPLSVKELQQLERQLEVALSQARQRKTQIMMEQMEELRKKERCLGDINKQLKGKLEAEGIGAFSSIQGAWESAAPVVVHPSQSADVDCEPSLQIGYHQFVPQEAAMPCRSAGGESNFIQGWML

SEQ ID NO: 1680 - protein, 669 aa, Zea mays
MLLGAAAARMEEKRVITGRERDQFPVGMRVLAVDDDPVCLKVLETLLRRCQYHVITTNQAITALKLLRENRDMFDLVISDVHMPDMDGFKLLELVGLEMDLPVIMLSVNGETKSVMKGITHGACDYLLKPVRIEELRDIWQHVVTDAWGKRERSNLDVYKDFNRLPGADPCHSHGHGHGQTTAGASDQSGRIGRKRKEMHSDEEDDGEENDFQEGDEPSAAKKPRVVWSIELHRKFVAAVNQLGIDKAVPKRILELMNVEKLTRENVASHLQKYRLYLKRLSAVASQQASIVAAFGGRDPFLHMGAFEGLQSYQPFAPCAALSSFIPHHGSLGRTTAAAFGVPELAPAITVQAAASNGMISHCAGDASKFQLSGIQENQQPNLGQGSATSLGLPQLQQKWIQQETGDLSAVFSGSALANTLSGALQRVASSPLPPQELLEGVQTKVSAQPPITMASVSSELVERTVGVSANLQDSGISPQGTLPINDGFTADKLQLQDPFDSNGGTNFSVNMPVCPSGSLTASSNAKGGASSCSPVLLAPDTGRHSNYLQFGVAGNSGHDMNDIKQDHLHQGLSTGGFNHDFGTCMTEQTDPNVPYLMPQMKPNTLSSEDKLKQRNIYDLGIPKLHGGFSSSSCNFDGLLNSMIKAEKDDLSFTDSDLGCDFFPLGACI

SEQ ID NO: 1681 - protein, 84 aa, Hyacinthus orientalis
PRAAAGRCLPCPRCKSKETKFCYFNNYNVNQPRHFCRNCHRYWTAGGTLRRVPVGAGRRKNRTPPPCGADGVGEADQAVWPAGS

SEQ ID NO: 1682 - protein, 604 aa, Zea mays
  misc_feature (259)..(259): Xaa can be any naturally occurring amino acid
  misc_feature (316)..(316): Xaa can be any naturally occurring amino acid
MMGGGLLVDQSVVFPGVHNFVDLLQQNGDKNLGFGSLMPQTSSGDQCVMGEGDLVDPPPDSFPDAGEDDSDDDVEDIEELERRMWRDRMKLKRLRELQQTRGKDSLASGAGLADGSSKPRQSQEQARRKKMSRAQDGILKYMLKMMEVCRAQGFVYGIIPEKGKPVSGASDNLRAWWKEKVRFDRNGPAAIAKYQADNAVPGAENELASGAASPHSLQELQDTTLGSLLSALMQHCEPPQRRYPLEKGVPPPWWPTGDXEEWWPELGIPKDQGPPPYKKPHDLKKAWKVSVLTAVIKHMSPDIEKIRRLVRQSKCXSFNTSSSEYDVDIIDECKGDEAGNQRTAVTDPTAFNIGLELSDKFLVPTPMKEETADVEFIQKRNAPSPAEPELMLNNRVYTCNNVQCPHSDYSYGFLDRNARNSHQYTCKYNDPITQSAENKPLPAPPQPQAFQPAFSQANQAANNLDFSLPMDGQRSIAELMNMYDTNFMTSKTMSSSDSVTIMERPNAMPQRIQMDEGFFGQGNGVFDDVNSMMQQQQQQQAPPVVQQQQQQFFIRDDTPFMSQMGDITSTAEFRFGSGFNMSSTAAAADYPGAAQKNDGTNWFY

SEQ ID NO: 1683 - protein, 492 aa, Oryza sativa
MSHTSEEESLNNLQQQPKLEACAAGSSKGDTVMPVVKKRRGHPGNPDPDVEVVALSPKTLLATNRYICEVCHKGFQRDQNLQLHRRGHNLPWKLKQRSSTEAKKKVYVCPEITCPHHDATRALGDLTGIKKHYSRKHGEKKWKCDRCSKKYAVQSDWKAHTKICGTKEYRCDCGTIFSRKDSFITHRAFCDALAEDTSRVNHSLATMVGSLHGQQQDMFSHGVPSFSSSPTDMIANLASNDHNSDSHLRSLSPYALVTRNTTLFSNQISPKESGFPLDGSVTSYPYMSMNSPYMSATALLQKAAEMGAKTSQDPISPLLLKSFPNNLTSSRDHMNISSRSQGDSLGNSTVNSDCMKTTEDENSYMIGRGNILINAPWSSGIMRPGTVPLIGLMNHPFSMREEKDNPSIFPENQTQHNRQDNISGVVDADAGLTQDFLGLGGSGTLDMSSETYNADVTALSYSDEQEKPQEHIYSYHQSSLDPTALEKPIWDS

SEQ ID NO: 1684 - protein, 255 aa, Zea mays
WGPGPPSSPAAVKGRSQVEKAGTATNGKAGDRASFVKSELMEDGSSAPRRSTPAPTRRSRSADFHNFSERRRRDRINEKLRALQELLPNCTKTDKVSMLDEAIDYLKSLQLQLQMLVMGKGGGMAPVVPPELQQYMHYITADPAHQMMPPPLRPSAGQLQPAAGRQFHITHQAAAANNDNDPQRRRQSNVESDFLSQMQNLHPSDQSPHHHNFLRPPRLQLFTPEQRGGGGGGLPNTSHNAGWISGRSSSYNFME

SEQ ID NO: 1685 - protein, 556 aa, Populus trichocarpa
MTIEESEPSHTSDHVLDWLEDSVSFVPSFFDDPYSTADTNPYQWWDQAEEFYQDLVNTNASLSSSITTSTTTNINTTSLVPPITPTLSNHPQSTTSNKKRKDPEDPVTKTSQNHHQRKNPNNWINKKQQDGEAVVVVKKSNGNKKTTNKGTGINGNNGNNKEGRWAEQLLNPCAAAIPIGNMSRVQHLLYVLHELASLTGDANHRLAAYGLRALTHHLSSSSTLSSASTGTITFASTEPKFFQKSLLKFYEVSPWFAFPHNIANASILQVLAQEQDPRRNLHVLDIGVSHGVQWPTLLEALTRRPGGPPPLVRITVITAASENDQTTETPFSIGPPGDNFSSRLLGFAKSMNINLQIKRLDNHSLQKLSGRIIDTKPDEALIVCAQFRLHHLNHNTPDERTEFLRVLRRLEPKGVILTENNMDCSCNSCGDFATGFSRRVEYLWRFLDSTSSAFKGRESVERRMMEGEAAKALTNRGEMNEGKEKWCERMRGVGFVGELFGEDAIDGARALLRKYDSNWEMRGEGKDGCVGLWWKGQPVSFCSLWKLDMKGSESKL

SEQ ID NO: 1686 - protein, 231 aa, Triticum aestivum
  misc_feature (17)..(17): Xaa can be any naturally occurring amino acid
PRAEEFGRGYRENVASXLQKYRLYLRRLSAVASQQASIAAAFGGRDPFLHMGAFEGLHSYHQPFAPPAALPSLNPHGLLSGAGAAAFGLQDLASPKANQCSSSNGAVSHCAGDTEKFHIVSLQDNQQADLSQGLTSSLGQPQLHQKWIHQETSDLCSVFSGGALANTMSGTLQRVTSSSLPPEDLLECTAHIKVGAHPSIGIPTGSSGLLERSVGVSADLRDSCISQQCAL

SEQ ID NO: 1687 - protein, 205 aa, Eucalyptus globulus
MGRGRVQLKRIENKINRQVTFSKRRCGLLKKAHEISVLCDADVALIVFSTKGKLFEYATDCCMERILERYERYSYAESQVLTNNAETNGNWTLEHAKLKARMEILQKNQKNLMGEELDSLSLKELQNLEHQLDTALKNIRSRKIQLMCESISELQRKDKALQEQNNMLAKKVKEKEKALAQQTQWDNPQDDGLTSSSGSLPSEWN

SEQ ID NO: 1688 - protein, 562 aa, Populus trichocarpa
MTIEGSEPNQASDHILDWLEDSVSFLPSFLDDPYNAADIDPYQWWEQAEEICQDLANTNTNTNTSLSSSTTTSTITNINTTSLISPNNPTISNHPPTSTSNKKRKDPEDLVPKTSQNHNQRRNLNHRINKEDQDGEAVVGEVVAVKKSNGNKKSTNKSTGNNSNNGNKKEGRWAEQLLNPCAAAITIGNLSRVQHLLYVLHELASPTGDANHRLAAHGLRALTHHLSSSSTVSSASIGTVTFASTEPKFFQKALLKFYEVSPWFAFPNNIANASILQVLGQEQDPTRILHILDIGVSHGVQWPTLLEALTRRPGGPPPLVRITVITATTENDQSTEPPFSIGPPGDNFPSRLLGFAKFMNINLEIKRLDGYPLQKLSGRIIDAKPEEALIVCAQFRLHHLNHNTPDERTEFFRVLRRLEPKGVILSENNMDCSCNSCGDFATGFSRRVQYLWRFLDSTSSAFKGRESEERRMMEGEGSKALTNRGEMNEGIDKWCERMQGVGFVGEMFGEDAIDGARALLRKYDGNWEMRTGGKDGCVGLWWKGQPVSFCSLWKLDMKGSDS

SEQ ID NO: 1689 - protein, 218 aa, Pisum sativum
MGRGGATTAAAAVEPVFFKEPRYRGVRKRPWGRFAAEIRDPLKKARVWLGTFDTAEEAARAYDTAARNLRGPKAKTNFPLAQPFYQNPEAGNPFGELRFYAGGAGEGFQDHRRPTSSGMSSTVESFGGPRPVRPPMPPSAVTGRRYPRTPPVAPGDCRSDCDSSSSVVDDADNDNAASSTMLSFKRQPLPFDLNAPPLEEGDVANGLGEDLHCTLLCL

SEQ ID NO: 1690 - protein, 251 aa, Triticum aestivum
  misc_feature (144)..(144): Xaa can be any naturally occurring amino acid
MDDGDIDFSNPETFLCEAMGNDPPVSCSMGTYFDDILNGDTDHLACTHTHTCNPPVHDLAHHTHTCVHVHTKILSASDDAAETSESLPESKKQRPSGNRAAVRKYREKKKAHTALLEEEVAHLKAVNQQLVKKLQSHSALEAEXVARLRCLLVDIRGRIEGEIGTFPYQRTVKSNDFVDQGSFLGGAQVMNSCGFRCNDQLYCNPGMQQARTMDDDGVMSGQVLGQGAGDSMGCVKPGSLNPPGCRGGQML

SEQ ID NO: 1691 - protein, 270 aa, Triticum aestivum
  misc_feature (115)..(115): Xaa can be any naturally occurring amino acid
  misc_feature (126)..(126): Xaa can be any naturally occurring amino acid
  misc_feature (144)..(144): Xaa can be any naturally occurring amino acid
  misc_feature (170)..(170): Xaa can be any naturally occurring amino acid
  misc_feature (236)..(236): Xaa can be any naturally occurring amino acid
MDDGDLDFSNPEAYLCSDTGADLPGGGCSMDSYFDGILNDTEHLACTHTHTCNPPVDDSSHTHTCVHVHTKIVSASSDGGADSPAENSGASKKRPSGNRAAVRKYREKKKAHTRXLEEEVVQLKAXLNNQLLKKLQIHPALEAXEAARLRCLLVDIRGRIDGEIGTFPYXRPVKNGDLVSGVDQGGFLGSAQVMNSCDFRCNDQMYCNTGMQMRTMGDDGAMSGQVFGQGTGDIAXIQCIGGVKSGFTMPPGCGGMGTLPSGCLPSSEKQ

SEQ ID NO: 1692 - protein, 199 aa, Arabidopsis thaliana
MVQTKKFRGVRQRHWGSWVAEIRHPLLKRRIWLGTFETAEEAARAYHEAAVLMSGRNAKTNFPLNNNNTGETSEGKTDISASSTMSSSTSSSSLSSILSAKLRKCCKSPSPSLTCLRLDTASSHIGVWQKRAGSKSDSSWVMTVELGPASSSQETTSKASQDAILAPTTEVEIGGSREEVLDEEEKVALQMIEELLNTN

SEQ ID NO: 1693 - protein, 430 aa, Glycine max
MGRHSCCYKQKLRKGLWSPEEDEKLLNHITKHGHGCWSSVPKLAGLQRCGKSCRLRWINYLRPDLKRGAFSQQEENMIVELHAVLGNRWSQIAAQLPGRTDNEIKNLWNSCLKKKLRQRGIDPNTHKPLSEVENDKDMNMMPPSTDKSTQKASVGSNEVVSNLVDHHQPPKTMPNSSSERYPLEVSTTSSTQELFLDRFGTTPTTCHHHHNNNNTSDVVGSYFSFQHLNYGTTTSMALSSNPNTSLCFILPSTSSDINNNNSIITSSSMLPSIFPTQHVKLQSNNNNPSSISSDGVQNWETSNNTNKNNGNMQLQSSTNYLDSTWGVAESMKIVNINKEAQVVPLQAEQEDLKWSEYLNTPFILGNNTAQNHQIHTSQSIYSEVKPETGFITDESCATWHHYQNQTPAFQLSDIYSKDLQRFSVTFGQTL

SEQ ID NO: 1694 - protein, 656 aa, Arabidopsis thaliana
MDTNTSGEELLAKARKPYTITKQRERWTEDEHERFLEALRLYGRAWQRIEEHIGTKTAVQIRSHAQKFFTKFGKAHSFWFTFQLEKEAEVKGIPVCQALDIEIPPPRPKRKPNTPYPRKPGNNGTSSSQVSSAKDAKLVSSASSSQLNQAFLDLEKMPFSEKTSTGKENQDENCSGVSTVNKYPLPTKVSGDIETSKTSTVDNAVQDVPKKNKDKDGNDGTTVHSMQNYPWHFHADIVNGNIAKCPQNHPSGMVSQDFMFHPMREETHGHANLQATTASATTTASHQAFPACHSQDDYRSFLQISSTFSNLIMSTLLQNPAAHAAATFAASVWPYASVGNSGDSSTPMSSSPPSITAIAAATVAAATAWWASHGLLPVCAPAPITCVPFSTVAVPTPAMTEMDTVENTQPFEKQNTALQDQNLASKSPASSSDDSDETGVTKLNADSKTNDDKIEEVVVTAAVHDSNTAQKKNLVDRSSCGSNTPSGSDAETDALDKMEKDKEDVKETDENQPDVIELNNRKIKMRDNNSNNNATTDSWKEVSEEGRIAFQALFARERLPQSFSPPQVAENVNRKQSDTSMPLAPNFKSQDSCAADQEGVVMIGVGTCKSLKTRQTGFKPYKRCSMEVKESQVGNINNQSDEKVCKRLRLEGEAST

SEQ ID NO: 1695 - protein, 178 aa, Arabidopsis thaliana
MAESQAKSPGGCGSHESGGDQSPRSLHVREQDRFLPIANISRIMKRGLPANGKIAKDAKEIVQECVSEFISFVTSEASDKCQREKRKTINGDDLLWAMATLGFEDYMEPLKVYLMRYREGDTKGSAKGGDPNAKKDGQSSQNGQFSQLAHQGPYGNSQVTFPLFSSHSSNTHHSLLIC

SEQ ID NO: 1696 - protein, 456 aa, Geobacter sulfurreducens PCA
MTAPKILAVDDDELSLLMLENLLADAGFAPLTAVSGAQALALLEREHVDLLISDLIMEGMNGLELLDRVRERYPNVPVIVVTARGSVESAVEAMRRGAYDYLAKPFNPEVLRITLQRALDYHHVVRENEQITGLLRERFTFQSIVTVNPAMKKLLELAARVAAARQTTVAIYGESGSGKEVLARAIHFAGKGLPAGFVAVNCAAVPEHLLESELFGHVRGAFTGADRDREGKFSLARGGTLLLDEIGDMPLPLQAKLLRVLQERVFEKIGSNTPISTDCRVIVATNRNLADMVAAGRFREDLYHRINVFPLVIPPLRERTDDIPLLCEHVLDQLRQHLGKPLPGISQKAMDAMLAHGWPGNVRELRNCLERAAILTDGELIRPEHLGFGAAGAPARETSAGPAPDTVQYALALPVDQLSLHALTERIMAITLERCGGNKSRAAQLLRIDRKAFYRG

SEQ ID NO: 1697 - protein, 350 aa, Lithachne humilis
FGLGASSHGHGHHHHHHHHPWGSSLSAVVAPPPQPPSAGAGAGMPNTPLTLNTAPTPGGNGGGGCGNPVLQLANGSLLDACAKAKEPSAPSSSYAADVEAIKAKIISHPHYSSLLAAYLDCQKVGAPPEVAARLTALAQDLELRQRTSLSGLGAATEPELDQFMEAYHEMLMKYREELTRPLQEAMEFLRRVESQLNSLSISGRPLRNILSSGSSEEDQEGSGGETELPEVDAHGVDQELKHQLLRKYSGYLSSLKQELSKKKKKGKLPKDARQQLLNWWDMHYKWPYPSETQKVALAESTGLDLKQINNWFINQRKRHWKPSDEMQFVMMDGYHPTNATWTAASSTTAG

SEQ ID NO: 1698 - protein, 480 aa, Zea mays
MSFRSIVRDVRDGFGSLSRRSFEVTLASIYGLTGHHKGKTQSSSHVLDDSPSIIRESRWANLPPELIRDIIRRLEADESTWPARKHVVCFAAVCRTWREMCKEIVLSPEFCGKLTFPVSLKQPGPRDGNTMVQCFIKRNKSKSTYHLYLCLSNVVTSESGKFLLSAKRHRKTTCTEYTISMDSGNISRSKRTYIGKIRSNFLGTRFLIYDTQAPYNGAVVPPAGRTSRRFNSTKVSPKLPSVSYNIAQVSYELNVLGTRGPRRMRCIMHSIPASSVEPGGTVPGQPEQIVPRALEDSFRSTASFSQSFRSTASFSKSIMDSSMDFNSARFSDIAGSSARFTGVPGSSARFAGVPGSSARFSGIAGARLDNDEESETKERPLVLRNKPPRWHEQLQCWCLNFRGRVTIASVKNFQLIAAATPPPAGAPTPSQPAPSDPDKVILQFGKVARDMFTMDYRYPLSAFQAFAICLSSFDTKLACE

SEQ ID NO: 1699 - protein, 532 aa, Arabidopsis thaliana
MKRDHHHHHQDKKTMMMNEEDDGNGMDELLAVLGYKVRSSEMADVAQKLEQLEVMMSNVQEDDLSQLATETVHYNPAELYTWLDSMLTDLNPPSSNAEYDLKAIPGDAILNQFAIDSASSSNQGGGGDTYTTNKRLKCSNGVVETTTATAESTRHVVLVDSQENGVRLVHALLACAEAVQKENLTVAEALVKQIGFLAVSQIGAMRKVATYFAEALARRIYRLSPSQSPIDHSLSDTLQMHFYETCPYLKFAHFTANQAILEAFQGKKRVHVIDFSMSQGLQWPALMQALALRPGGPPVFRLTGIGPPAPDNFDYLHEVGCKLAHLAEAIHVEFEYRGFVANTLADLDASMLELRPSEIESVAVNSVFELHKLLGRPGAIDKVLGVVNQIKPEIFTVVEQESNHNSPIFLDRFTESLHYYSTLFDSLEGVPSGQDKVMSEVYLGKQICNVVACDGPDRVERHETLSQWRNRFGSAGFAAAHIGSNAFKQASMLLALFNGGEGYRVEESDGCLMLGWHTRPLIATSAWKLSTN

SEQ ID NO: 1700 - protein, 100 aa, Zea mays
  misc_feature (72)..(72): Xaa can be any naturally occurring amino acid
  misc_feature (85)..(85): Xaa can be any naturally occurring amino acid
  misc_feature (90)..(90): Xaa can be any naturally occurring amino acid
  misc_feature (93)..(93): Xaa can be any naturally occurring amino acid
  misc_feature (96)..(96): Xaa can be any naturally occurring amino acid
  misc_feature (99)..(99): Xaa can be any naturally occurring amino acid
MDWGNRTKAAAAAAAPDERAGGGEGLGGYVKVMTDEQMEVLRKQISIYATICEQLVEMHRVLTEHQDTIAGXGCLAHLYCDPLIXPGGHXITXARXRWXP

SEQ ID NO: 1701 - protein, 354 aa, Triticum aestivum
MPMGSSAAMPALPPGFRFHPTDEELIVHYLRRQAASMPSPVPIIAEVNIYKCNPWDLPGKALFGENEWYFFSPRDRKYPNGARPNRAAGSGYWKATGTDKAILSTPANESIGVKKALVFYRGKPPKGVKTDWIMHEYRLTAADNRTTKRRGSSMRLDDWVLCRIHKKCGNLPNFSSSDQEQEHEQESSTVEDSQNNHTVSSPKSEAFDGDGDDHLQLQQFRPMAIAKSCSLTDLLNTVDYAALSHLLLDGAGASSSDAGADYQLPPENPLIYSQPPWQQTLHYNNNNGYVNNETIDVPQLPEARVDDYGMNGDKYNGMKRKRSSGSLYCSQLQLPADQYSGMLIHPFLSQQLHM

SEQ ID NO: 1702 - protein, 336 aa, Pharus lappulaceus
YGVLGAGASTTTHHHHPWASSLSAVVAPPPPLPPTPLTLTTTPTATTTTNNPVLQLANGNLLDACGGKAKDPSSSSSYAADVEAIKAKIISHPHYSSLLAAYLDCQKVGAPPEVATRLTAVAHELEARQRTALGGLGAAMEPELDQFMEAYHEMLVKYREELARPLQEAMEFLRKVELQLNSLSISGRSLRNILSSGSSEEDQEGSGGETELPEIDAHGVDQELKHQLLKKYSGYLSTLKQELSKKKKKGKLPKDARQQLLNWWELHYKWPYPSESQKMALAESTGLDLKQINNWFINQRKRHWKPSDEMQFVMMDGYHPTNAAFYMDGHFINDSG

SEQ ID NO: 1703 - protein, 293 aa, Candida albicans SC5314
MKKALPEHAKLSKESKECIQECVSEFISFITSQAADRCLVEKRKTLNGEDILWAMYTLGFENYSETLKIYLAKYRQYEQEQLSLKPPRKKIRKRKTKSSLSQTQSKEQVDQDQDFQQIEQQYDDGEEEEEESENEEGDMSNIESNLILQNLPEYSDDYFDDEDEEEDRQQQREENSDNEPQQHHGDDSQPINLQPQLPSSAVPSLPTQQQQQFSDINPTTESNQQESFFTTQYYPNQTQYVNAAPLPTNPQPRQYQNQNQPNNYQNDQRQNDKQRIIPDLLNITNSYSEDEFI

SEQ ID NO: 1704 - protein, 280 aa, Zea mays
MDAQQQLDLVMRHQSMATVCESEDALGSSESDPARPARPRGKRSRAAEVHNLSEKRRRSRINEKMKALQTLIPNSSKTDKASMLDDAIEYLKHLQLQVQMLSMRNGLYLPPGNLSGAPETLAPLEMCAALNQSGAKASNSGVVVLPGNKIPVARLLLDPPNHDQRHENPLVLQSVPSSSTAVEPRFLQQPAQPNLQSFQLAVPPEMIFDEADMMLKHRLASGRETTSLPVGHEAKPGRQEACMVNSDISNRGSLGKEVFMPYLHSLQSGDTEGGLRAGSN

SEQ ID NO: 1705 - protein, 513 aa, Agrobacterium tumefaciens str. C58
MTAHVLVIDDDPVQRRLLKNAVERYGHLALLAENGRAGLELLKQYSGEINVIVLDLMMPEMDGLAFLKAVGELGTDVPVIVQTGQGGIDTVVQAMRAGAFDFVVKPVSPERIGAAISNALKLDRKEAKARTGRRGRSNAVNFTDIVSASPAMLRVIELAQRAAQSSIPVVLEGESGVGKEMVARAIQSGGDRANKPFITVNCGAIPHNLVESILFGHEKGAFTGATEKHVGKFMEADGGTLFLDEIGDLPLDVQVKLLRAVQQGEIETVGSARVQKVNVRLISATNKNLIEEVKEGRFREDLYYRLNVFPITIPALRRRKEDIPHLARVFAERFSAEQKLPNPVGLDASALALLTAYDWPGNIRQLENAVFRAVVLSQGSELSDSDFPQIALQLPEFSNGDDGDDIIRSPSGSSLKLAAYSPPPAAESHAVIEEPSDISTTIYRGGNLISSTDDSGNIRKLAEIEEELIRFALRFYRGQMSQVARKLGIGRSTLYRKLKDYGIDPDDPLRDVA

SEQ ID NO: 1706 - protein, 356 aa, Triticum aestivum
  misc_feature (166)..(166): Xaa can be any naturally occurring amino acid
  misc_feature (203)..(203): Xaa can be any naturally occurring amino acid
VTLQNKFVQKSRLAPVRNSRDIVDPRVRLSLTSAVLDDNGKFLLSAKRSRRTTYTDYAISMDPKNISRSSSGYIGKLRSNFLGTKFIIYDTQPPYNASKLCPQERTSRRFSSRKVSPKVPAATGSYPIAQVNYELNVLGTRGPRRMQCTMNSIPTSAVDPDGVVPXQPKELLPRLFEESFRTTASSRYSTDFSSCRFSEFGGXKGPLREDGGDENAGDKESPLVLKNKSPRWHEQLQCWCLNFRGRVTVASVKNFQLIAAPAPPPPASGGEAAPQPSSQTQPPQQQPTSAAAAQPQPAGSSLSASSSSSSSHHDTVLLQFGKVSKDTFTMDYRYPLSAFQAFAICLTSFDTKLACE

SEQ ID NO: 1707 - protein, 587 aa, Arabidopsis thaliana
MKRDHHQFQGRLSNHGTSSSSSSISKDKMMMVKKEEDGGGNMDDELLAVLGYKVRSSEMAEVALKLEQLETMMSNVQEDGLSHLAADTVHYNPSELYSWLDNMLSELNPPPLPASSNGLDPVLPSPEICGFPASDYDLEVIPGNAIYQFPAIDSSSSSNNQNKRLKSCSSPDSMVTSTSTGTQIGGVIGTTVTTTTTTTTAAAESTRSVILVDSQENGVRLVHALMACAEAIQQNNLTLAEALVKQIGCLAVSQAGAMRKVATYFAEALARRIYRLSPPQNQIDHCLSDTLQMHFYETCPYLKFAHFTANQAILEAFEGKKRVHVIDFSMNQGLQWPALMQALALREGGPPTFRLTGIGPPAPDNSDHLHEVGCKLAQLAEAVHVEFEYRGFVANSLADLDASMLELRPSDTEAVAVNSVFELHKLLGRPGGIEKVLGVVKQIKPVIFTVVEQESNHNGPVFLDRFTESLHYYSTLFDSLEGVPNSQDKVMSEVYLGKQICNLVACEGPDRVERHETLSQWGNRFGSSGLAPAHLGSNAFKQASMLLSVFNSGQGYRVEESNGCLMLGWHTRPLITTSAWKLSTAAY

SEQ ID NO: 1708 - protein, 303 aa, Zea mays
  misc_feature (87)..(89): Xaa can be any naturally occurring amino acid
  misc_feature (91)..(91): Xaa can be any naturally occurring amino acid
MSFHYHDHGLSMDAAAAAAAAASSPNPSGFSPGIGGEREKAAIAAHPLYERLLEAHVACLRVATPVDQLPRIDAQIAARPPPLAAAXXXAXAGAAAAGGPSGGEELDLFMTHYVLLLCSFKEQLQQHVRVHAMEAVMGCWELEQSLQSLTGASPGEGTGGTMSDDEDNQVDSEANMFDGNDGSDGMGFGPLILTEGERSLVERVRKELKNELKQGYKEKLVDIREEIMRKRRAGKLPGDTASVLKAWWQAHSKWPYPTEDDKARLVQETGLQLKQINNWFINQRKRNWHSNPTSSAEKTKKKR

SEQ ID NO: 1709 - protein, 113 aa, Triticum aestivum
MQEPGRRPFAGAVDLRRPKGYPAPSATPQPQAEAGAGDAHGDPCPRCESRDTKFCYYNNYNTSQPRHYCKSCRRYWTKGGTLRNVPVGGGSRKSSSSSSSSSSSPKRAKNSKR

SEQ ID NO: 1710 - protein, 159 aa, Arabidopsis halleri subsp. gemmifera
MRIRRREEKENQEYKKGLWTVEEDNILMDYVLNHGTGQWNRIVRKTGLKRCGKSCRLRWMNYLSPNVNKGNFTEQEEDLIIRLHKLLGNRWSLIAKRVPGRTDNQVKNYWNTHLSKTSSEITPPPSKPRGKTTALCRHCSSLLPQLLLVIINKKMSTRI

SEQ ID NO: 1711 - protein, 228 aa, Arabidopsis halleri subsp. gemmifera
MRIRRREEKENQEYKKGLWTVEEDNILMDYVLNHGTGQWNRIVRKTGLKRCGKSCRLRWMNYLSPNVNKGNFTEQEEDLIIRLHKLLGNRWSLIAKRVPGRTDNQVKNYWNTHLSKKLVGDYSSAVKTTGEDDGSLPSLFITAATTSSRYHQQENVYENIAKSFDGVVSASYEDKPKQELAQNDVLMATTNDPSHYYGNNALWVHDDDFELSSFVMMNFASGDIEYCL

SEQ ID NO: 1712 - protein, 540 aa, Oryza sativa
  misc_feature (499)..(499): Xaa can be any naturally occurring amino acid
MCDKDPGIKLFGRVIPLAPEAEAAAAADGSDQPEAAAAAAAEVEPAAQDEDHHKETEERKYDEMKVDVPQEEEDNEMKVDAPQEKKDNEVTADVPEEKGNDEMRVDASESIESIEPVSRSTLDNKKEDQGQMNNVEEKAASDSKDENEKTANDESGQDKVLKKPDKILPCPRCNSMDTKFCYYNNYNVNQPRHFCKNCQRYWTAGGTMRNVPVGAGRRKSKSSSLHYRHLLMAPDCMMGSRVEISKSMNPEAFASAHSTPIQPIGRNETVLKFGPEVPLCESMASVLNIQEQNGTNAAAVPTGENQEDNSCISSITSHNVLPENAAQVDKNSTPVYCNGVGPVPQYYLGAPYMYPWNIGWNNVPMMVPGTSMPESASQSESCSTSSAPWMNMNSPMMPVASRLSAPPFPYPLVPPALWGCLSSWPATAWNIPWIRTNGGCMSPSSSSNSSCSGNGSPLGKHSRDSSLPLKEDKEEKSLWVPKTLRIDDPDEAAKSSIWXFKPFQSKGESKGQAASETRPARALKANPAALSRSQSFQETS

SEQ ID NO: 1713 - protein, 164 aa, Arabidopsis lyrata subsp. kamchatica
MRIRRREEKENQEYKKGLWTVEEDNILMDYVLNHGTGQWNRIVRKTGLKRCGKSCRLRWMNYLSPNVNKGNFTEQEEDLIIRLHKLLGNRWSLIAKRVPGRTDNQVKNYWNTHLSKKLVGDYSSAVKNHRRKRRLSAVIVHHCRHNFFSSSSTRKCLREYSQEL

SEQ ID NO: 1714 - protein, 291 aa, Arabidopsis thaliana
MEARCDFCGTEKALIYCKSDSAKLCLNCDVNVHSANPLSQRHTRSLLCEKCSLQPTAVHCMNENVSLCQGCQWTASNCTGLGHRLQSLNPYSDCPSPSDFGKIWSSTLEPSVTSLVSPFSDTLLQELDDWNGSSTSVVTQTQNLKDYSSFFPMESNLPKVIEEECSGLDLCEGINLDDAPLNFNASNDIIGCSSLDNTKCYEYEDSFKEENNIGLPSLLLPTLSGNVVPNMSLSMSNLTGESNATDYQDCGISPGFLIGDSPWESNVEVSFNPKLRDEAKKRYKQKKSKRM

SEQ ID NO: 1715 - protein, 300 aa, Antirrhinum majus
MEQPNNDGNNGGSCYRPQLPNQSPPANGVPNSTTTNSTHSPPNESVKRKRGRPRKYGTPEQAAAAKRLSAPKKRDSASGVASVSSASSKKSPLAALGNMGQSFSPHIITVAAGEDVGQKIMMFVQQSKREICVISASGSVSSASLRQQASSGGSVTYEGRFDILSLSGSFIHAEFGGRTGGLSVCLSSSDGQIIGGGVGGPLTAAATIQVIVGTFVVETKKDANVEAAASGKSPSPNGGASAPGLSFRSPADSGIQMGGGGNPFLIQNRTMHMTPMEWIGSADHGMHQSPENGDYDHIPD

SEQ ID NO: 1716 - protein, 207 aa, Daucus carota
MERADQQARGFQGYRKIHQQQQLPASGTASTGTDNNPAAGDQDCLVREQDRFMPIANVIRLMRKSIPSHAKISDDAKELVQESVSEFISFVTSEANYRCQKEQRKTITAEDVLWAMSSLGFDDYVEPLTFYLDRFREADGGERSALRGEPLVRRSGEHGAPGIPPTFAPGYYMGPHNALLGAVTMGSFVNDVHNAGPSGAGVNTLDP

SEQ ID NO: 1717 - protein, 236 aa, Oryza sativa (indica cultivar-group)
MAGADVDVGTELRLGLPGGGGGAAEAAAKAAKRGFEETIDLKLKLPTAGMEEAAAGKAEAPAAEKAKRPAEAAAADAEKPPAPKAQAVGWPPVRSFRRNIMTVQSVKSKKEEEADKQQQQPAANASGSNSSAFVKVSMDGAPYLRKVDLKMYNSYKDLSLALQKMFGTFTATGNNMNEVNGSDAGTTYEDKDGDWMLVGDVPWQMFVESCKRLRIMKGSEAIGLAPRAKDKYKNKS

SEQ ID NO: 1718 - protein, 309 aa, Zea mays
IRLEDVLYHNYYEACPYLKFAHFTANQAILEAFNGHDCVHVIDFNLMQGLQWPALIQALALRPGGPPLLRLTGVGPPSAENRDNLREIGLRLAELARSVNVRFAFRGVAAWRLEDVKPWMLQVSLNEAVAVNSIMQLHRVTAVDAAVEEVLSWIRSLNPKIVTVVEQEANHNGEGFLERFTEALHYYSTVFDSLDACPVEPDKAALAEMYLQREICNVVCCEGPARLERHEPLAKWRDRLGKAGFRPLHLGFNAYKQASMLLTLFSAEGFCVQENQGSLTLGWHSRPLIAASAWQAAPLRDDETLRFGH

SEQ ID NO: 1719 - protein, 221 aa, Zea mays
MARGKVQLRRIENPVHRQVTFCKRRAGLLKKARELSVLCDAHVGIIVFSAHGKLYDLATTGTMEELIERYRTASSREAADGCGDNNRMDPKQETMVLQQEINLLQKGLRYIYGNRTNEHMSVEELNALERYLEIWMYNIRSAKMQIMIQEIQALKSKEGMLQAANEVLQEKIVEQSSLLDVGMVVADQQNGHFSTVPLVEEMISNPLTILSGYSNCRGYSF

SEQ ID NO: 1720 - protein, 552 aa, Triticum monococcum
MYRVKSESDCEMMHQEDQMDSPVGDDGSSGGSPHRGGGPPLKKGPWTSAEDAILVDYVKKHGEGNWNAVQKNTGLFRCGKSCRLRWANHLRPNLKKGAFTPEEERLIIQLHSKMGNKWARMAAHLPGRTDNEIKNYWNTRIKRCQRAGLPIYPASVCNQSSNEDQQGSSDFNCGENLSSDLLNGNGLYLPDFTCDNFIANSEALSYAPQLSAVSISSLLGQSFASKNCGFMDQVNQAGMLKQSDPLLPGLSDTINGTLSSVDQFSNDSENLKKALGFDYLHEANSSSKMIAPFGGALTGSHAFLNGTFSTSRTINGPLKMELPSLQDTESDPNSWLKYTVAPAMQPTELVDPYLQSPTATPSVKSECVSPRNSGLLEELLHEAQGLKSGKNQQLSVRSSSSSVSTPCDTTVVSPEFDICQDYWEEPLNEYAPFSGNSLTGSTAPVSAASPDVFQLSKISPAQSPSLGSGEQAMEPAYEPGAGDTSSHPENFRPDALFSGNTTDSSVFNNAIAMLLGNDMNTDCKPVFGDGIVFDTSPWSNMPHACQMPEEFK

SEQ ID NO: 1721 - protein, 355 aa, Arabidopsis thaliana
MNIVSWKDANDEVAGGATTRREREVKEDQEETEVRATSGKTVIKKQPTSISSSSSSWMKSKDPRIVRVSRAFGGKDRHSKVCTLRGLRDRRVRLSVPTAIQLYDLQERLGVDQPSKAVDWLLDAAKEEIDELPPLPISPENFSIFNHHQSFLNLGQRPGQDPTQLGFKINGCVQKSTTTSREENDREKGENDVVYTNNHHVGSYGTYHNLEHHHHHHQHLSLQADYHSHQLHSLVPFPSQILVCPMTTSPTTTTIQSLFPSSSSAGSGTMETLDPRQMVSHFQMPLMGNSSSSSSQNISTLYSLLHGSSSNNGGRDIDNRMSSVQFNRTNSTTTANMSRHLGSERCTSRGSDHHM

SEQ ID NO: 1722 - protein, 547 aa, Arabidopsis thaliana
MKRGYGETWDPPPKPLPASRSGEGPSMADKKKADDDNNNSNMDDELLAVLGYKVRSSEMAEVAQKLEQLEMVLSNDDVGSTVLNDSVHYNPSDLSNWVESMLSELNNPASSDLDTTRSCVDRSEYDLRAIPGLSAFPKEEEVFDEEASSKRIRLGSWCESSDESTRSVVLVDSQETGVRLVHALVACAEAIHQENLNLADALVKRVGTLTGSQAGAMGKVATYFAQALARRIYRDYTAETDVCAAVNPSFEEVLEMHFYESCPYLKFAHFTANQAILEAVTTARRVHVIDLGLNQGMQWPALMQALALRPGGPPSFRLTGIGPPQTENSDSLQQLGWKLAQFAQNMGVEFEFKGLAAESLSDLEPEMFETRPESETLVVNSVFELHRLLARSGSIEKLLNTVKAIKPSIVTVVEQEANHNGIVFLDRFNEALHYYSSLFDSLEDSYSLPSQDRVMSEVYLGRQILNVVAAEGSDRVERHETAAQWRIRMKSAGFDPIHLGSSAFKQASMLLSLYATGDGYRVEENDGCLMIGWQTRPLITTSAWKLA

SEQ ID NO: 1723 - protein, 535 aa, Oryza sativa
MSMQASNRPYRYPDNSQIPYYSRSSMHVGQNGTYHVQQNHEDLYASSDDGSQNGNSKAQGLQAQYCTLDSSSGNFVYPAHSSTSSHISGSPISQQDSHSEHTSGSPASASCVTEVPGLRFTTIEEIENAMFGPEPDTVSSDCSLLTDSAFYQDNWREHLGINTGDLKQVIAACGKAVDENSWYRDLLISELRNMVSISGEPMQRLGAYMLEGLVARLSSTGHALYKSLKCKEPTSFELMSYMHLLYEICPFFKFGYMSANGAIAEAVKGENFVHIIDFQIAQGSQWATMIQALAARPGGPPYLRITGIDDSNSAHARGGGLDIVGRRLFNIAQSCGLPFEFNAVPAASHEVMLEHLDIRSGEVIVVNFAYQLHHTPDESVGIENHRDRILRMVKGLSPRVVTLVEQEANTNTAPFFNRYLETLDYYTAMFEAIDVACPRDDKKRISTEQHCVARDIVNLIACEGAERVERHEPFGKWRARLSMAGFRPYPLSALVNNTIKKLLDSYHSYYKLEERDGALYLGWKNRKLVVSSAWR

SEQ ID NO: 1724 - protein, 278 aa, Arabidopsis thaliana
MEDGELDFSNQEVFSSSEMGELPPSNCSMDSFFDGLLMDTNAACTHTHTCNPTGPENTHTHTCFHVHTKILPDESDEKVSTDDTAESCGKKGEKRPLGNREAVRKYREKKKAKAASLEDEVARLRAVNQQLVKRLQNQATLEAEVSRLKCLLVDLRGRIDGEIGSFPYQKPMAANIPSFSHMMNPCNVQCDDEVYCPQNVFGVNSQEGASINDQGLSGCDFDQLQCMANQNLNGNGNGSFSNVNTSVSNKRKGDTFILYLRVFSVNRSGLEPEVVYSL

SEQ ID NO: 1725 - protein, 228 aa, Arabidopsis lyrata subsp. kamchatica
MRIRRREEKENQEYKKGLWTVEEDNILMDYVLNHGTGQWNRIVRKTGLKRCGKSCRLRWMNYLSPNVNKGNFTEQEEDLIIRLHKLLGNRWSLIAKRVPGRTDNQVKNYWNTHLSKKLVGDYSSAVKTTGGNDDSLPSLFITAATTSSRHHQQENVYENIAKSFDGVVSASYEDKPKQELAQNDVLMATTNDPSHYYGNNALWVHDDDFELSSLVMMNFGSGDIEYCL

SEQ ID NO: 1726 - protein, 392 aa, Lycopersicon esculentum
DARKSPPTWLNTSLLRQQHSQFGNSSSPSSAAAAAAVAGGNNFLHLQTSNSDSSNSNQWLSPTAAAGGGGNGGGGGHNDELSESMNFAKKMSQQHSGGGEENNNNNNNNNNNNNEEENSWEREKCKADILNHPLYDQLLSAHVSCLRIATPVDQLPRIDAQLAQSQNVVAKYSVLGQGQPPLDDKDLDQFMTHYVLLLSSFKEQLQQHVRVHAMEAVMACWELEQSLQSLTGVAPGEGTGATMSDDDDDQADSDTNFLDGGFDGPDSMGFGPLVPTESERSLMERVRQELKHELKQGYKEKIVDIREEILRKRRAGKLPGDTTSVLKAWWQSHSKWPYPTEEDKARLARETGLQLKQINNWFINQRKRNWHSNPSTSSSQKSKRKSAGEIKQ

SEQ ID NO: 1727 - protein, 310 aa, Lycopersicon esculentum
MQQEEGGLGLMGSSNTSGLGGGDISSMMISSEDHHNRNLNHYNQLKSEIATHPLYEQLLSAHVACLRVRTPIDQLPLIDAQLTQSHNLLRSYASSQQQQQQHSLSHHERQELDNFLAQYLLVLCSFKEQLQQHVRVHAVEAVMACREIEQNLQLLTGATLGEGTGATMSDDEDELQMDFSLDVSGGDAHDLMGMGFGLPTESERSLMERVRQELKIELKQGFRSRIEDVREEILRKRRAGKLPGDTTTVLKNWWQQHSKWPYPTEDDKAKLVEETGLQLKQINNWFINQRKRNWHSNSQSVTSLKSKRKR

SEQ ID NO: 1728 - protein, 232 aa, Brassica napus
  misc_feature (197)..(197): Xaa can be any naturally occurring amino acid
  misc_feature (202)..(202): Xaa can be any naturally occurring amino acid
  misc_feature (212)..(212): Xaa can be any naturally occurring amino acid
MGYMCDFCNEQRSMVYCRSDAACLCLSCDRNVHSANALSKRHSRTLICERCNAQPASVRCSDERVSLCQNCDWSGHNNDATSQHKRQSINCYSGCPSSEELASIWSFCLDLNFSSAGQSACEQEMGLMTIDEGTGEDKPGVQNVNLDQPGTSSALAKDIGVSEDDFCGNLMMDEVDLAFEKYDELFGTAYNSSKESXEHGEXGSLFENMRAXKGMQQPAGKHAASEDSFMTC

SEQ ID NO: 1729 - protein, 321 aa, Eucalyptus gunnii
MGMAMGIKEKASSNPHNHKLRKGLWSPEEDEKLMRYMLTNGQGCWSDIARNAGLQRCGKSCRLRWINYLRPDLKRGAFSPQEEELIVHLHNILGNRWSQIAARLPGRTDNEIKNFWNSTLKKRLKMNSATSSSNESDLSNPQDIAAGIMPSFHAQYDVLATCMDSSPAPFPPMDNISAPNQFDPFPTLNNRCDTWEGVGFFTFPSGIAPVSMGDDSSYLNLEHAKVGLLGSEFSVPPLASSTTTTEENNYRSIGCGMDGKGENSFSNNNDSCFSNTTTASFKAEDDMSGFGNNLQAANLRIGEWDLEGLMDDLPSFPFLDF

SEQ ID NO: 1730 - protein, 223 aa, Zea mays
MPDSDNDSGGPSNAGGELSSPREQDRFLPIANVSRIMKKALPANAKISKDAKETVQECVSEFISFITGEASDKCQREKRKTINGDDLLWAMTTLGFEDYVEPLKHYLHKFREIEGERAAASAGASGSQQQQQQGELPRGAANAAGYAGYGAPGSGGMMMMMMGQPMYGGSQPQQQPPQPQPPQQQQQQHQQHHMAMGGRGGFGQQGGGGGSSSSSGLGRQDRA

SEQ ID NO: 1731 - protein, 255 aa, Eucalyptus gunnii
  misc_feature (214)..(214): Xaa can be any naturally occurring amino acid
MGRSPCCEKAHTNKGAWTKEEDDKLIAYIRAHGEGCWRSLPKAAGLLRCGKSCRLRWINYLRPDLKRGNFTEEEDEIIIKLHSLLGNKWSLIAGRLPGRTDNEIKNYWNTHIRRKLLNRGIDPATHRLINEPAQDHHDEPTISFAANSKEIKEMKNNAELNFMCNLEESADVASSARERCPDLNLELGISPPSHQLHQPEPLLRFTGRKSDLCXECNLGLKNSQNCRCSVGVIESETSVGYDFLGLKASVLDYRS

SEQ ID NO: 1732 - protein, 241 aa, Triticum aestivum
  misc_feature (133)..(133): Xaa can be any naturally occurring amino acid
  misc_feature (160)..(160): Xaa can be any naturally occurring amino acid
  misc_feature (162)..(162): Xaa can be any naturally occurring amino acid
  misc_feature (169)..(170): Xaa can be any naturally occurring amino acid
  misc_feature (173)..(173): Xaa can be any naturally occurring amino acid
  misc_feature (185)..(185): Xaa can be any naturally occurring amino acid
  misc_feature (191)..(191): Xaa can be any naturally occurring amino acid
  misc_feature (193)..(193): Xaa can be any naturally occurring amino acid
  misc_feature (195)..(195): Xaa can be any naturally occurring amino acid
  misc_feature (197)..(198): Xaa can be any naturally occurring amino acid
MPESDNDSGGPSNTGGEGELSSPREQDRFLPIANVSRIMKKALPANAKISKDAKETVQECVSEFISFITGEASDKCQREKRKTINGDDLLWAMTTLGFEDYVDPLKHYLHKFREIEGERAAATSTSTSTTPDXQETTTTMPAGYPDAPGGMMMMGQPMYXAXRPHHKEXXPNXKIAMGRGEAGFXYFGGGXGXSXSXXVLTEKGLFLFLFFSFWLTRGGFQTVSFWVKTLLKFFPGGFFPV

SEQ ID NO: 1733 - protein, 440 aa, Zea mays
MSFRSMVRDIRESFGNISRRNFEVRIHHRGRSLGSSGDLQDRPAEVQQSRWASLPPELLCDVMKRLEEDDSSWPDRKDVVSCASVCTTWRDMCKDIVRSPEHCAKLTFPVSLKQPGPRDGVIQCFIKRDKSKLTYRLYLSLSSGVLDENGKFLLAAKRSRRMAHTEYAIFMDSRNFSRSSTGYIGKLRSNFLGTKFIIYDTQAPYNGGRVCTQERAPSRRLSSRKVSPRVPSGSYPVAQVNYELNVLGTRGPRRMQCAMHSIPASAVEPGGVVPGQPKELLPRLFDESFRSTATSSFSKYSVADSSMDLGSCPFSEVEVGGGSLREGDESEKERPLVLRNKAPRWHEQLQCWCLNFRGRVTVASVKNFQLIAPAKTQPQPQASGPPPPPPPSSSSYHDPVILQFGKVGRDMFTMDYRYPLSAFQAFAICLTSFDTKLACE

SEQ ID NO: 1734 - protein, 487 aa, Oryza sativa
MMLKDLAEIQQQQLLAAAEENMSNLTSASGDQASVSSHPAPPPAKKKRSLPGNPDPEAEVIALSPRTLMATNRYVCEICGKGFQRDQNLQLHRRGHNLPWKLKQRNPKEVVRKKVYVCPEPGCVHHDPARALGDLTGIKKHFSRKHGEKKWKCDKCSKRYAVHSDWKAHSKVCGTREYRCDCGTLFSRRDSFITHRAFCDALAEESARAVTAAAAVAGQQQHGGGMLFSQVADVLDHQAAMAMGGHGLMQELCLKREQQQQQQQFAPSWLTAQQQQQQLEAMAGAGNPAAMYGSARLDQEFIGSSTPESGGAQQAGLSFGFSSTSSAPPHPAASSAHMSATALLQKAAQMGATLSRPSSHAHMAAAAAASTHNSSSSAATTNAPPPPPTSNVSSTCVGAGGYGLAFEASHFIAADESSRGARSDRDTGNGVAGAGNDGLTRDFLGLRAFSHGNIMSMAGFDPCMSTTSASSAAPYDHHHHSNKPWHS

SEQ ID NO: 1735 - protein, 228 aa, Arabidopsis thaliana
MAESQTGGGGGGSHESGGDQSPRSLNVREQDRFLPIANISRIMKRGLPLNGKIAKDAKETMQECVSEFISFVTSEASDKCQREKRKTINGDDLLWAMATLGFEDYIDPLKVYLMRYREMEGDTKGSGKGGESSAKRDGQPSQVSQFSQVPQQGSFSQGPYGNSQSLRFGNSIEHLEVLMSSTRTLFITIFRDSTMPVVSENLSDPLSIDMDCEAIYHHFIGLLILSCK

SEQ ID NO: 1736 - protein, 173 aa, Glycine max
MSDAPPSPTHESGGEQSPRGSSSGAREQDRYLPIANISRIMKKALPPNGKIAKDAKDTMQECVSEFISFITSEASEKCQKEKRKTINGDDLLWAMATLGFEDYIEPLKVYLARYREAEGDTKGSARSGDGSATPDQVGLAGQNSQLVHQGSLNYIGLQVQPQHLVMPSMQSHE

SEQ ID NO: 1737 - protein, 253 aa, Triticum aestivum
MDDGDIDFSNPQTFLCEAMGNDPPASCSMGSYFDDILNSDADHLACTHTHTCNPPVHDLAHHTHTCVHVHTKILSASDDAAETSESLPEGGATKKQRPSGNRAAVRKYREKKKAHTALLEEEVAHLKAVNQQLVKKLQSHSALEAEVARLRCLLVDIRGRIEGEIGTFPYQRTVKSNDFVDQGSFLGGAQVMNSCDFRCNDQLYCNPGIQQARTMEDDGVMSGQVLGQGAGDSMGCVKPGSLNPPGCRGGQML

SEQ ID NO: 1738 - protein, 178 aa, Zea mays
MAEAPASPGGGGGSHESGSPRGGGGGGSVREQDRFLPIANISRIMKKAIPANGKIAKDAKETVQECVSEFISFITSEASDKCQREKRKTINGDDLLWAMATLGFEDYIEPLKVYLQKYREMEGDSKLTAKSSDGSIKKDALGHVGASSSAAEGMGQQGAYNQGMGYMQPQYHNGDISN

SEQ ID NO: 1739 - protein, 787 aa, Zea mays
MGMLNCVDTTSGAGAKLQHQQQAPTSPTASVSESNIVAPSVSADIDANDALASLQALRFDGDIDVEIQSPDIAMWESLFAEQMGAAGGDFLMLSPRRDFMAAGSPSRRDFMVSSPKRDYMVSSSPKRDYMTSSPMRDLMASSPKREYMVSSPRRDSSSSRRSPFSPNLFSTSGGGHQHGYAAHGPTDGGVGGAGQPLYGGLANHHGKGKSQSPLHKGYINNSGNKQSTGPSSLSCSSSYGHADNDLLPSLPSMDTCFLDDYKDGGYIGYQQQMPGKQQAAPGIMVNNNGGCSTAVTTVGVAPSPSSHQLPTLSECLAMPEPAFVGGEEAAAGGLQMGVGLPSDLYYAGQFAGGGGGGLTTTSSSLQHQMAKSDHQWAAAESSLHSMLGSVIQTEADEQLLTYSTHDACRSRTAALQLVHLLLACADFVSKGDQPSALRHLHLLRRVASPLGDSMQRVASYFADALAARLSSNNPSSSSAGAGAGAGVAPYTFPPSPDTLKVYQILYQACPYIKFAHFTANQAIFEAFHGEDRVHVVDLDILQGYQWPAFLQALAARPGGPPTLRLTGVGHPAAAVRETGRHLASLAASLRVPFEFHAAVADRLERLRPAALHRRVGEALAVNAVNRLHRVPAVHLGPLLSMIRDQAPKIMTLVEQEAGHNGPYFLGRFLEALHYYSAIFDSLDATFPADSAQRMKVEQCLLAPEIRNVVACEGAERVARHERLDRWRRIMEGRGFEPVPLSPAAVAQSQVLLGLYGAGDGYRLTEDRGCLLLGWQDRATIAASRTRG

SEQ ID NO: 1740 - protein, 403 aa, Arabidopsis thaliana
  misc_feature (359)..(359): Xaa can be any naturally occurring amino acid
MKNSKCNLIDSKLEEHHHLCGSKHCPGCGRMIQAATKPNWVGLPAGVKFDPTDQELIEHLEAKVKGKEENKKWSSSHPLIDEFIPTIDGEDGICYTHPQKLPGVTRDGLSKHFFHKPSRAYTTGTRKRRKIIQTDHDSELTGSSETRWHKTGKTRPVMINGQQRGCKKILVLYTNFGKNRRPEKTNWVMHQYHLGINEEEREGELVVSKIFYQTQPRQCVSNTNWSDHHGSKDVIGIGVGDEISSVAATLQSLGSGDVVSRVNMHPHTRSFDEGTAEASKGRENQHVSGTCEEVHDGIITSSMSSHHMIHDHHNQHHQIGDRREFHMSSSYPMTPTITSQHESIFHVTSTMPFQRQQLXGSVVWFGIRRPNYGLYHSYVYRRRAFRSKPSAKCRVVNVSTILV

SEQ ID NO: 1741 - protein, 176 aa, Panicum miliaceum
KRRNGLLKKAYELSVLCDAEVALIIFSSRGRLFEFSTSSCIYKTLERYRSCSFASEASAPPEAELNNYQEYLKLKTRIEFLQTTQRNLLGEDLGPLSIKELEQLENQIEISLKHIRSSKNQQMLDQLFELKRKEQQLQDSNKDLRRKIQEIGEENVLRLTCQDLGPTGSSGHPDDA

SEQ ID NO: 1742 - protein, 181 aa, Lotus japonicus
HRLLAAYVSCQKVGAPPEVVARLEEACGSAVGMAGDAVGSGSIGEDPALDQFMEAYCEMLTKYEQELSKPLKEAMLFLQRIEFQFKNLTASSDVGCNEGTERNTGSSDEDADLYNMIDPQAEDRELKGQLLRKYSGYLGSSKQEFMKKRKKGKLPKEARQQFLEWWSRHYKWPYPNRCRLE

SEQ ID NO: 1743 - protein, 251 aa, Zea mays
MDPASSVAAEFWRPPYHHLRASSVVTAAARSGGGSSSRRRPRRDAAASSEEEPSKLVSTSGTAASSSAGCQDSADPEAKRLKQIAPSEKNDRRTEAETNSGNASKSADKKPAPKEPPKDYIHVRARRGQATDSHSLAERARREKISERMKVLQDIVPGCNKVIGKASVLDEIINYIQSLQRQVEFLSMKLEAINAHVSNATVAFPTKDFGVAPYNTAPSLTLDPQTPREYAQGSMSDWLHMQVGNAYERVT

SEQ ID NO: 1744 - protein, 243 aa, Lotus japonicus
LDCQKIGAPPEVVARLVAARQEFEARRRSSVSSRENSKDPELDQFMEAYYDMLVKYREELTRPIQEAMGFMRRIETQLNMLCSGPVRIFNDDKCEGVGSSEEDQDNSGGETELPEIDPRAEDRELKTHLLKKYSGYLSSLKQELSEKKKKGKLPKDARQKLLNWWELHYKWPYPSESEKVALAESTGLDQKQINNWFINQRKRHWKPSEDMQFMVMDGLHPQNATLYMDGHYMAADGHYRLGP

SEQ ID NO: 1745 - protein, 227 aa, Lotus japonicus
IKAKIVSHPQYPRLLQAYIECQKVGAPPEIARLLEEIRRENDLCKRDVVSTRFGADPELDEFMESYCDMLVKYKSDLARPFDEASNFLNKIEMQLSNLCTGASVPTLSDEGGVSSDEEFSTGDGDAQDGQQLRGEDRELKDRLLRKFGSHIGTLKLEFSKKKKKGKLPKEARQTLLQWWNVHYKWPYPTESDKIELAKATGLDQKQINNWFINQRKRHWKPSENMQS

SEQ ID NO: 1746 - protein, 297 aa, Brassica napus
  misc_feature (103)..(103): Xaa can be any naturally occurring amino acid
  misc_feature (126)..(126): Xaa can be any naturally occurring amino acid
  misc_feature (143)..(143): Xaa can be any naturally occurring amino acid
  misc_feature (160)..(160): Xaa can be any naturally occurring amino acid
MEEAALGMIGATVGGGDGGDAVLVAEQNRQMKGEIVTNPLYEQLLAAHVACLRVATPIDQLPTIEAQLSHSEHLLRSYASTAVGFSHHDRHELDNFLAQYVMXLCSFKEQLQQHVRVHAVEAVMAXCREIENNLHSLTGATLXEKGSGATMSEDEDDLHXMDFSSDNSGVDFNGGHDMTGFGPLLPTESERSLMERVRQELKIELKQGFKSRIEDVREEIMRKRRAGKLPGDTTTVLKNWWQQHCKWPYPTEDDKAKLVEETGLQLKQINNWFINQRKRNWHSNSHSLTSLKSKRKH

SEQ ID NO: 1747 - protein, 189 aa, Arabidopsis thaliana
MAKEGLALEITELRLGLPGDNYSEISVCGSSKKNKRVLSDMMTSSALDTENENSVVSSVEDESLPVVKSQAVGWPPVCSYRRKKNNEEASKAIGYVKVSMDGVPYMRKIDLGSSNSYINLVTVLENLFGCLGIGVAKEGKKCEYIIIYEDKDRDWMLVGDVPWQMFKESCKRLRIVKRSDATGFGLQQD

SEQ ID NO: 1748 - protein, 345 aa, Glycine max
MAFHDHLQHEIAFQRFTEEQELTENRDMQQRLPPPTWLNNVNARQQNFLDTEKSVDRNNRSESNCESEDLREYKADILGHPLYDQLLSAHVSCLRIATPVDQLPRIDAQLQQSQRVVEKYSALAHNGVVDEKELDQFMTHYVLLLCAFKEQLQQHVRVHAMEAVMACWDLEQSLQSLTGVSPGEGTGATMSDDEDDQAESNANLYEGSLDGGETLGFGPLVPTESERSLMERVRHELKHELKQGYKEKIVDIREEILRKRRAGKLPGDTTSLLKAWWQSHSKWPYPTEEDKARLVQETGLQLKQINNWFINQRKRNWHTNNPSSSSNSKSKRKSSAGEASNQSFM

SEQ ID NO: 1749 - protein, 188 aa, Cucumis sativus
MTQVAAKGLDLEITELRLGLPGDCCSLISTSKNNEKKRVFSEVEVEDKSRSKGEDEGRRKQVVGWPPVCSYRRRNSFKGKGEQCESEEIMNMGMKKQMYVKVSFEGTPFLRKVDLGMVKGYGDLVGAMEKLFGSPIGCYEYTVTYEDRDGDWMLVGDVPWKMFIESCKRLRIMKKTEGKGSEMNSLSQ

SEQ ID NO: 1750 - protein, 304 aa, Arabidopsis thaliana
MEKPGGFWIPKKSNKESSWEELAFAEDDAAGSLWPPRSYTCSFCRREFKSAQALGGHMNVHRRDRARLKQADDQYLFPKSSSSPEYPSHKDSDNIHETSCYTLVFNTKPNYFKTQHSCVIDLSSSSSLPYLTPSRVSSGLPGKQHTSSSPPSFVVEPSKNSKYIPSSSPWSCPSTVVEQKSCDLYEIPAMEGEKKRKTESDVPKIGHKAKLSLGNTTDLSVSMNLVIHQSFPITAHGSDEEIGRVDIRKRRRRHESPSQQSIFISSLSCKSDIITRNEESKHKGDRFEDLDLELRLGTDPPKGI

SEQ ID NO: 1751 - protein, 319 aa, Medicago truncatula
MDLNSHYQQLQQNQPNSRLLRFRSSFKQQGEGCGGSATAATNSGETSSSTFREFMDHNPSNHKVDNNESSLSQRHMNSQQGYRMDQHKGFYTNLLRQSSSHDGHFSNNNIISFGNGYEPMKGVENYDGVKDSDGELTLSMNILNNQIGFSPRTPSSFRMLSQNPKTGSDGIGTTSHDDRRQVGSNDDAQYYGHKLVYDSNDQNVGVRNQVDTLSHHLSLPRKSSEMFVVEKLLQFPDSVPSSIRAKRGFATHPRSLAERVRRTRISERMRKLQEIVPNIDKQTCTSEMLDLAVEYIKDLQKQLKTMSAKRAKCRCRNKK

SEQ ID NO: 1752 - protein, 180 aa, Arabidopsis thaliana
MWNPNKIEELEDDDESWEVKAFEQDTKGNISGTTWPPRSYTCNFCRREFRSAQALGGHMNVHRRDRASSRAHQGSTVAAAARSGHGGMLLNSCAPPLPTTTLIIQSTASNIEGLSHFYQLQNPSGIFGNSGDMVNLYVEVPPRLIEYSTGDDESIGSMKEATGTSVDELDLELRLGHHPP

SEQ ID NO: 1753 - protein, 226 aa, Arabidopsis thaliana
MMDRGECLMSMKLRPMVTRPSSDGTLFWPFREERAFASAEEYGGGGGCMWPPRSYSCSFCGREFKSAQALGGHMNVHRRDRARLKQQSLSPSSTDQATPPECDRQQQVLDVGSKVLVQEETRKPNGTKREISDVCNNNVLESSMKRYEHDNGEVKTDLSVGLLSTEFDPRKKQLINGSSSSWKRAKTDVSRFPMMLGLVIGISEINGHHEELDLELRLGADPPKVN

SEQ ID NO: 1754 - protein, 391 aa, Hordeum vulgare subsp. vulgare
MTRSRPTTTMGGSVPDQHHQQQQHDGEVDGGQLQHGGEHVETVMPGFRFHPTEEELIEFYLRRKVDGKRFNIDLIASVDLYRYDPWDLPALASIGDKEWFFYVPRDRKYRNGDRPNRVTPSGYWKATGADRMVKVVEGNRSIGLKKTLVFYVGKAPKGLRSSWIMNEYRLPHGETERYQKEISLCRVYKRPGIDDNLHLTGTTTRSSGSRAAATRHSTAAHRTSAVATHRQQPPVFVEGAGHHSSSALKAYNAHTTQGTNAASTMTSLSAAGVTPPAMFRSTASVASLSSTNSTEEDGTSLYHHHLKGHNNPAVMQLHSSTHAALLNTNSSAMATIPIDELSRAIGSYSQASNPNQPTAPMQGPLLNFPSLEKIWDWNPLLESPKVCTSFK

SEQ ID NO: 1755 - protein, 203 aa, Catharanthus roseus
MSEEIISVSDRFLLSLIEEHLLSDNSDDSSSELTSTEENWEEIFADFLNWSGSEIQKRGSPSSESCQSNSMAESCQEDSVVGTPPEAAAGGGCSKDWNRYKGVRRRPWGKFAAEIRDPKKKGSRIWLGTYETPEDAALAYDAAAFNMRGAKARLNFPHLIGSNISGPVRVNPRKRFPAEPSTTSSSSSSSSSENSGGRKKRRY

SEQ ID NO: 1756 - protein, 238 aa, Glycine max
MSRYLRLQLPLIDAQLSQSHHLLRSYVSHNTLSLSPHHRQELDNFLAQYLIVLCTFKEQLQQHVRVHAVEAVMACRDIENTLQALTGVSLGEGTGATMSDDEDDLQMDFSLDQSSAEGHDMMGFGLPTESERSLMERVRQELKIELKQGFKSRIEDVREEILRKRRAGKLPGDTTSVLKNWWQQHAKWPYPTEDDKAKLVEETGLQLKQINNWFINQRKRNWHSNSQSVTSLKSKRKR

SEQ ID NO: 1757 - protein, 462 aa, Zea mays
MPSYAHHHSSPLVRNGAGRVVRRRLRGTERDSLDVFLCFLYLYREINKKKNPETKKLFFLNRPASPLVLGICDFDIRPVWVFFRPVKDDTRMDALKCNNNCAPPEETAEDADAAGALVEKDGFSVEDLLDLEEFGEPDKDGAEHEDDDAPPVPAAAEERSKDDSQPLSVVTYDLPSPPPEMVDLPSHDVEELEWVSRIMDDSLSELPPQAQPPPAVVASLAGRPPLAQQRRPFAHDGAYRAVAPPPGPLRTPTICALSTEAMIPVKAKRSKRSRGPAWWRSGAPFLSDSASSSSTTTTSSCSSSGSFSPFLRLDSPPFGGLELGEGYYGHLLPRPPSKKSKHGAKGSKHKPKKRGRKPKHLPTNSSGAGAAASQPGPSDRRCSHCGVQKTPQWRAGPEGAKTLCNACGVRYKSGRLLPEYRPACSPTFVSSIHSNSHRKVLEMRRKKEGDMVATAAPAVASF

SEQ ID NO: 1758 - protein, 544 aa, Oryza sativa
MADTPTSRMIHPFSNIPSQNLKQFQYSDNPQHPCHPYRAPSDTHVVPHHYGLKSHSPDAGYESQATPNKYTLDSSEGAGCMRHDSPSSQSFTTRSGSPLSQEDSHSDSTDGSPVGASCVTEDPNDLKQKLKDLEAVMLGPDSEIVNSLENSVANQLSLEPEKWVRMMGIPRGNLKELLIACARAVEEKNSFAIDMMIPELRKIVSVSGEPLERLGAYMVEGLVARLASSGISIYKALKCKEPKSSDLLSYMHFLYEACPYFKFGYMSANGAIAEAVKGEDRIHIIDFHISQGAQWISLLQALAARPGGPPTVRITGIDDSVSAYARGGGLELVGRRLSHIASLCKVPFEFHPLAISGSKVEAAHLGVIPGEALAVNFTLELHHIPDESVSTANHRDRLLRMVKSLSPKVLTLVEMESNTNTAPFPQRFAETLDYYTAIFESIDLTLPRDDRERINMEQHCLAREIVNLIACEGEERAERYEPFGKWKARLTMAGFRPSPLSSLVNATIRTLLQSYSDNYKLAERDGALYLGWKSRPLVVSSAWH

SEQ ID NO: 1759 - protein, 548 aa, Gossypium hirsutum
MKRDHQEISGSGSNPAESSSIKGKLWEEDPDAGGMDDELLAVLGYKVRSSDMADVAQKLEMLEKVMGTAQEDGISQLGDTVHFNPSDLSGWVQNLLIEFNGSTTTPDPNFNDDSEYDLRAIPGVTAYPPVKSDPGLENTRKRAKTESSSSSSSTTTRPVVLIDSQETGVRLVHTLMACAEAVQQDNLKLADALVKHIGLLASSQTGAMRKVATYFAEALARRIYRIFPPDSLDPSYNDKLQMHFYETCPYLKFAHFTANQAILETFSMANRVHVIDFGLKQGMQWPALMQALALRPGGPPAFRLTGIGPPQPDDTDALQQVGWKLAELAERIGIEFEFPGFVANSLADLEPEMLDIRPPEIEVVAVNAVFELHPLLARPGGIEKVVSSIKAMKPKIVTVVEQEANHNGPVFLDRFTEALHYYSTLFDSLEGSGVAPPSQDLAMSELYLGRQICNVVACEGMDRVERHEPLTQWRTRMETAGFSPVHLGSNAYKQASMLLALFASGDGYRVEENNGCLMLGWHTRPLIATSAWRLAGTESGSELTQELS

SEQ ID NO: 1760 - protein, 337 aa, Glycine max
MMMDPRQREKLLHKTEACAFVAGVVPELSLVTVPGNNNNTNNVNNNNNNVSHSQSHRSGRIHENHHHHLGLVAAVTTTFGTVHRKKRMARQRRSTNPTLLMNPLINNNNNKSGSSLPSPSIASSSHVPLSSSTLPPAREIDQRRLRFLFQKELKNSDVSSLRRMILPKKAAEAFLPALESKEGIVISMDDIDGLHVWSFKYRFWPNNNSRMYVLENTGDFVNTHGLRFGDSILVYQDSENNNYVIQAKKASDQDEFMEETSDTINDIFLNDYEVNKPGCFNVTYPAVNDTGMSFIYETTFSNDSPLDFLGGSMTNFSRIGPVETFGSVENLSLDDFY

SEQ ID NO: 1761 - protein, 272 aa, Oryza rufipogon
MGRRACCAKEGMKRGAWTSKEDDVLASYIKSHGEGKWREVPQRAGLRRCGKSCRLRWLNYLRPNIKRGNIDDDEEELIVRLHTLLGNRWSLIAGRLPGRTDNEIKNYWNSTLSRKIGTAATAAAGSRGGSTPDTARATDAASSSSVVPPGQQQQPASRADTDTATAAAAAAATTTTVWAPKAVRCTRGFFFHDRETAPLAAAAPAPAGELGDGDDVDCDYYCSGSSSAATTTSLSSLPAVVEPCFSAGDDWMDDVRALASFLDTDDAWNLCA

SEQ ID NO: 1762 - protein, 615 aa, Medicago truncatula
MMMFEDMGFCGDLDVFCGTLGEGDISSVRQTEPDSVVEDDYSDEEMDVDELERRMWRDKMRLKRLKEQTKAKEGIDAAKARQSQEQARRKKMSRAQDGILKYMLKMMEVCKAQGFVYGIIPEKGKPVTGASDNLREWWKDKVRFDRNGPAAISKYQADNAIPGKNDGCNSIGPTPHTLQELQDTTLGSLLSALMQHCDPPQRRFPLEKGNPPPWWPAGTEDWWPQIGLPKDQGPPPYKKPHDLKKAWKVGVLTAVIKHMSPDIAKIRKLVRQSKCLQDKMTAKESATWLAIINQEESLARELFPDYCPPLSSGGGTGSMVINDCSEYDVDGADGESNFDVEDRKPENLHPSNLGMDRMRGSFPVQQPSHQIKGEVVTNLDFIRKRKISNDFNMMMEPKMYTCEHPQCAYSEARLAFQDRPSRDNHQLNCPHRNRNNPAVYGDPNFHATEVKPVIFPQSFVQPNSTVQPASLVPPSFDLTGFGVSEDGQKMISDLMSGYDTHVIGNNNASSTNCVVIENQNLSQPIIQQQQQDNFFLNQGMVMEANFFTREENQFDRFKAMNSPFEANLNNNNNMHPMYGSSCDLASFDFKEDLQLQGGVGMDALYKQPDVSIWNY

SEQ ID NO: 1763 - protein, 272 aa, Oryza rufipogon
MGRRACCAKEGMKRGAWTSKEDDVLASYIKSHGEGKWREVPQRAGLRRCGKSCRLRWLNYLRPNIKRGNIDDDEEELIVRLHTLLGNRWSLIAGRLPGRTDNEIKNYWNSTLSRKIGTAATAAAGSRGGSTPDTARATDAASSSSVVPPGQQQQPASRADTDTATAAAAAAATTTTVWAPKAVRCTRGFFFHDRETAPLAAAAPAPAGELGDGDDVDCDYYCSGSSSAATTTSSSSLPAVVEPCFSAGDDWMDDVRALATFLDTDDAWNLCA

SEQ ID NO: 1764 - protein, 556 aa, Arabidopsis thaliana
MANPLLYSPINPQFFQPLLPGFTNHLDIPVAFFLKYLVGTNVGKTAELRSDASEMTWKVKIDGRRLSNGWEDFTIAHDLRVGDIVVFRQEGELVFHVTALGPSCCEIQYGEDTLEEDKIGNLSFILNIISTFRMSLRILLNLSTEKLCGTENVSSKKKSLKREAESAPDNSLDSCFVATVTGSNLKRDTLYIPKEFALSNGLMNKYQIVLMNEEGESWKIDLRREAYNYGRFYMRRGWRSFCIANGKKPGDVFAFKLVKNEETPMIQLFPMTIEDLDKLPTVTASNLSRDRLYLPKTFIMSNGLLKKFQMCLMNEEGESWTIDVKHEAHTGRFLTIRGWRRFCVANGKKPGDLLKFKLVHNEETPVLQLLPLNSEDLHKLNPSNDTRHGQSLKVTKKEFLGMEATENEFLGEEVYCNDSFKASEKDTLPFAEPINEDIRQGQCSQTIKQEYVSTEEKNSTSQNRFVTLTLTHSSKLNLPFEFMKRNGIKKAGKITMVDRYDAKWRTSLLMDKIGTMSLGRGSKGFCEVNGVEMNESFILELIWEDTVPLLKFCSKV

SEQ ID NO: 1765 - protein, 349 aa, Gossypium hirsutum
MIEMHDEEQGEDVRAMPSRSRKCSSFDLNDEAGSERDCIGETSVEEEEIENITEGSSSNNNNGNGNDRRRVRQYVRSKLPRLRWTPDLHYSFVRAVERLGGQERATPKLVLQLMNVRGLSIAHVKSHLQMYRSKKLDEAGQVLSQSKRAIQGRGEFGSLLCQAMTTLSPHHRHQQQHFRMENGGIVLASESLDGSNTTFKANFPRHHQFPNSFISKAFGQENGFYIQNQIHGTGPIRAMASRFLEEKRWHPFERISNRWKVNGNMYKDMQSQSHCFWQRPSSDEDKHEPLTKFSSCRTEFEWNQDKVLKDGERLPDLQLRLSQRNGKFDEEKNNHCKGTHEISTQLSLS

SEQ ID NO: 1766 - protein, 317 aa, Oryza sativa (japonica cultivar-group)
MAFHYQDHALAMDAAAAAAETGGHHHPGFVGAGGVVGGGGGGGWEREKAAIAAHPLYERLLEAHVACLRVATPVDQLPRIDAQIAARPPPLAAATAAAAAAAAGGAPSGGEELDLFMTHYVLLLCSFKEQLQQHVRVHAMEAVMACWELEQTLQSLTGASPREGSGATMSDDEDNQVDSESNMFDGNDGSDGMGFGPLMLTEGERSLVERVRQELKHELKQGYREKLVDIREEILRKRRAGKLPGDTASTLKAWWQAHSKWPYPTEEDKARLVQETGLQLKQINNWFINQRKRNWHSNPASSSSDKSKRKRYRVVDF

SEQ ID NO: 1767 - protein, 187 aa, Oryza sativa (japonica cultivar-group)
MADGPGSPGGGGGSHESGSPRGGGGGGGGGGGGGGVREQDRFLPIANISRIMKKAIPANGKIAKDAKETVQECVSEFISFITSEASDKCQREKRKTINGDDLLWAMATLGFEDYIEPLKVYLQKYREVRTDGDSKLTAKAGDGSVKKDVLGSHGGSSSSAQGMGQQAAYNQGMGYMQPQYHNGDVSN

SEQ ID NO: 1768 - protein, 856 aa, Zea mays
  misc_feature (447)..(447): Xaa can be any naturally occurring amino acid
MAAAACAGGCACRSLLVRVLGARASPPPRGLGAEAGRGCGGKDALFVELWKACAGPLSCVPPLGEKVYYLPQGHIEQVEASTNQLAEQQGTPLYNLPWKIPCKLMNIELKVEPDTDEVYAQLTLLPDKKQDENTSTTVEEEEVVVPPALPATNEGPHIHSFCKTLTASDTSTHGGFSVLRRHADECLPPLVRPSEPLTHVVVGLTLPVVGLMMMMPLTVLFDQDMSQHPPNQELVAKDLHGAEWRFRHIFRGENGELRVGVRRALRHQTTIPSSVISSHNMHLGVLATAWHAVNTDSMFTVYYKPRTSPAEFVVSRDRYYESLKRNYSIGMRFKMRFEGEEAAEQRFTGTIVGIGASDPSGWADSKWRSLKVRWDEPSSISRPERVSPWQIEPSVSPCHVNPLPVRFKRSRSSVNALPSDVSTVTREVTSKVMADSQQNSLTRALHXKEGHNFTVRYHDNSDVKTTQDLTVWSSGTEQQRNNIAAQTKLCLEGWTPTRSPEGYNQIFSAFKPLKDIHNPLGPFPSQISGTHSNSWDTADARYPVQQANYSMLPGTWSLRPHNSGFRMNQQNYLVMPEGANFTGKSAFTSLQDHGTDKCSTGCFGHIESSSHTDHASSSLIRPQPLVLGNGVQKSKGTSFKLFGIPLGSPEKSEPLVSPPSVAYDGKLQTSPSEKGNQLDVVEVDNCSHPSKTVKPLDGPQSDSITENNQPSPEATLNIQNKVQSSSTRSCKKVHKQGSALGRSIDLTKFACYDELIAELDQMFDFDGELKSPCKSWLVVYTDNEGDIMLVGDDPWNEFCDMVHKIFIYTREEVERMNPGALNSRSEDSLSDSLGRGVASRDPRGGGSTSALDSENC

SEQ ID NO: 1769 - protein, 313 aa, Glycine max
MEQGQCWTKRKKYSLSSSTGSPTNPSYGDSWEEQAFAEDAANSLGGCIWPPRSYSCSFCRREFRSAQALGGHMNVHRRDRARLKQQPTSPHNEILCHDLETQLHKPVQSPFASLGGYLYPSPLCGLACKKTNPNCDPDFVASPSSSPSPSKALLAPSANIGTFREETMIPLYDSSILHKISPASNSSESWPNSAEDHRLYSCKFHPQADTTKPSKGIMDFRCRGNKGNNDDIDGDINFNSVVYRTHPSLQFESTKEPDHISCKKRKTDASSTLFSPKSSSVDRHQVQPKMFEFSPSSMEELDLELRLGNRSKI

SEQ ID NO: 1770 - protein, 598 aa, Medicago truncatula
MYTSRKKPNSAGIQLYYQQQSLRQIDSNKNRFKTLQTNSNNGGRRQRTNVSLETSNWESNWEKQFCTLESSQVANDVIAFDSPSSASGDPFNMRSTFSPQISRYCSSDNTTNVSPLGVYSSADDDSFEFKMKEIELSLVGTDIEVFGSCLSNSNGSLHQGTSQDNEFHIDEMISEQGFKESEISLLGPSSDIVDSCQSNLNGSLHQGTSQYDWSQFEEIIPKLDLKEELIRCAQFVFDGDFQKAIGFMNKVLGKMVSVAGSPIQRLGAYMLEGLRARVESSGSAIYKALKCEEPTSIELMSAMHILYQICPYFQFAYISSNAVICEEMQNESRIHIIDFQIAQGSQWMLLLHALKHKPGGPPFIRVTGIDDSQSFHARGGKLDIVGKKLEDCAKTCKVPFEFNSVKMYGCEVQLEDFEVQHDEVLVVNFPFALHHIPDESVSMENHRDRLLRLVKILSPKVVLFVEQESNTNTSPFLPRFAETLNYYTAMFESIDVALPRDDKKRINAEQHCVARDIVNIIACEGDERFERHELFGKWKARFSMAGFVPLLLSPSVIDSVRTLLKDFNKDYRIEQTDVAINLAWKSKVMCTSSAWRCY

SEQ ID NO: 1771 - protein, 319 aa, Glycine max
  misc_feature (140)..(140): Xaa can be any naturally occurring amino acid
MGRPPCCDKIGIKKGPWTPEEDIILVSYIQEHGPGNWRSVPTNTGLMRCSKSCRLRWTNYLRPGIKRGNFTDHEEKMIIHLQALLGNRWAAIASYLPQRTDNDIKNYWNTHLKKKLKKMQSGGDDDDNNDDKLNSCNSQXKGQWERRLHTDFHMARHALCEALSLDKPTQIFPETKLPSTSSLSPAAPPPQTSLYASSTENIAKLLENWMKKSPNITTITETKPFNINNMVATGSSSSEGTQSTITCTQDHALDSLWSFNSERSCQSEENTNLGESKPQYQEAQVPLMLLENWLLDDAAPQCNEDLMNMSLEESTEGLF

SEQ ID NO: 1772 - protein, 984 aa, Arabidopsis thaliana
MADQSLLHSPINPHFFQPILTESRTHLNIPVAFFSKHVEGRNNQNKTVTLRSDASDKTWLVKMDGLKLTDGWEDFAFAHDLRTGDIVVFRLEGEMVFHVTALGPSCCEIQYHTSSHNINDDDRNDQINIASRNSSRVKKNPRKKVESSLDHSRFVAKVSAWCLSNDRLYIPLSFARLNGLNKINSKKIYLQNEEGRSWKLVLRHDKSGMQTFVQSGWRRFCSENGIRQGQYTFKLVRKSAPPVIRLCRAKAKPKQRSVAEYSSDHSCFEGSVTPSSLRNDLLYLPRSFVNSNRLDKRCSEIVLKNEQGVKWPLVLKRFKSVTYLPKGWTSFCQVNRIKAGDSFKFKLVGTWKKPVLSLCPTQSNNHKTPLECSEGNKSEESEEDCLEVKKKKYWSRCRASVENMDDDQTNIGNSSRKKRVSKNPREKVESSSDHSSFVGSVNPSSLYKDQLYLPRNFVSSNFLDKRCSEIVLKNERGEKRTLVLKHFKKDLTFLKKGWTSFCQVNRIKAGDSFKFKLVGTWNKPVLSLCPTETNYHKTPLACSEGNKSEESEEEGTEDKNTSQDCLEVKKRKYWSTCRASAENIDDDQTNIGNSSKEKRVKKNPVKKAESSSDHSSFVANVTASSLNYDRLYLPLSFVSSNGLDKMNGKEIVLLNEEGLSWKFNLKYNQAGKHTYVRPGWSRFCDANGMSQGQQFTFKLVQKHGPPVMYLSLSEHRPKSESSSHRSYFVGSVTASSIKKDKLYLWKSFVSSNGLDKGCKKIILKNKWGREWKLVLKHYKSNCFTIIKRGWTSFCQGNGLKAGDSFKFKLVGTGEKPVLSLCPAESSHEKIPLECPEGIDDVNSLSSNPSSGDDSSRSEESEEENMEDKNISQDCLETKKRKYCSSSSYSQNRFVTLTLTRSAFQTYKLVNGINKPRKITLLGQDGVKKVVDLYQESSSRIMRFGKGWREFFDAQGVKIDDSFVLELIWEKEASPVLKFCTKVPK

SEQ ID NO: 1773 - protein, 215 aa, Hyacinthus orientalis
DGLRGKQFSKHNYKAADALVQQISVLAASQGGAMRKVAGFFAEALALRIYRPHPQQDCSLDSAFSDILQMHFYESCPYLKFAHFTANQAILEAFEGCRRVHVIDFGMKQGMQWPALMQALALRPGGPPLFRLTGIGPPQPDNTDALQQVGWKLAQLADQIHVEFEYRGFVANSLADLEPYLLESAPNPRNGPHEIEAVAANSIFELHTLLAREGA

SEQ ID NO: 1774 - protein, 233 aa, Daucus carota
MGRAPCCEKMGLKKGPWSSEEDQILISFIQQNGHGNWRALPKLAGLLRCGKSCRLRWINYLRPDIKRGNFSKEEEETIIELHQKLGNKWAAIAAKLPGRTDNEIKNVWHTHLKKKLKNYDQVKNESNVKMQVESENRRNSPQHSTSELSSVTDSSAKAKCVIKSEQNTELSESSKIPEIDASFWSEEFTINNQDKGVPGIIEEFQESGNVDAEMDFWCNLFSGAEDFKDLPEF

SEQ ID NO: 1775 - protein, 254 aa, Festuca arundinacea
MSRKKKVRRRSTGPDSVSEIIKKWKEQNQKLQEENGSRKAPAKGSKKGCMAGKGGPENSNCKYRGVRQRTWGKWVAEIRKPNRGNRLWLGSFPTAVEAAHAYDEAARAMYGATARVNFSERSPDANSGCTSAPRVLMSNGPTAVSHPADGKDESESPPSLTSDAKDEPESAGTVVHEVKTEASNDSTSVREERKTVEVFQPEGEALRKEEKVSYDYFNVEEVLDMIIVELSADRKMEVHEEYQDGDDGFSLFSY

SEQ ID NO: 1776 - protein, 264 aa, Festuca arundinacea
MSRKKKVRRRSTGPDSVSEIIKKWKEQNQKLQEENGARKAPAKGSKKGCMAGKGGPENSNCKYRGVRQRTWGKWVAEIREPNRGNRLWLGSFPTAVEAAHAYDEAARAMYGATARVNFSERSPDANSGCTSAPPVLMSNGPTAVSHLADGKDESESPPSLTSDAPTATLDRSDAKDEPESAGTVVHEVKTEVSNDSTSVREERKAVEVFQPEGKALRKEEKVSYDYFNVEEVLDMIIVELSADRKMEVHEEYQDGDDGFSLFSY

SEQ ID NO: 1777 - protein, 272 aa, Oryza rufipogon
MGRRACCAKEGMKRGAWTSKEDDVLASYIKSHGEGKWREVPQRAGLRRCGKSCRLRWLNYLRPNIKRGNIDDDEEELIVRLHTLLGNRWSLIAGRPPGRTDNEIKNYWNSTLSRKIGTAATAAAGSRGGSTPDTARATDAASSSSVVPPGQQQQPASRADTDTATAAAAAAATTTTVWAPKAVRCTRGFFFHDRETAPLAAAAPAPAGELGDGDDVDCDYYCSGSSSAATTTSSSSLPAVVEPCFSAGDDWMDDVRALASFLDTDDAWNLCA

SEQ ID NO: 1778 - protein, 438 aa, Zea mays
MSFRSMVRDIRESFGNISRRNFEVRIHHRGKSLGSSGDLQDRPAEVQQSRWASLPPELLCDVMKRLEEDDSSWPDRKDVVSCASVCTTWRDMCKDIVRSPEHCAKLTFPVSLKQPGPRDGVIQCFIKRDKSKLTYRLYLSLSSGVLDENGKFLLAAKRSRRMAHTEYAIFMDSRNFSRSSTGYIGKLRSNFLGTKFIIYDTQAPYNGGRVCTQERAPSRRLSSRKVSPRVPSGSYPVAQVNYELNVLGTRGPRRMQCAMHSIPASAVEPGGVVPGQPKELLPRLFDESFRSTATSSFSKYSVADSSMDLGSCPFSEVEVGGGSLREGDESEKERPLVLRNKAPRWHEQLQCWCLNFRGRVTVASVKNFQLIAPAKTQPQPQASGPPPPPPSSSYHDPVILQFGKVGRDMFTMDYRYPLSAFQAFAICLTSFDTKLACE

SEQ ID NO: 1779 - protein, 694 aa, Oryza sativa (japonica cultivar-group)
MAATQATAARKFPEGLRVLAVDDSPVCLMLLEALLRRCKYQPTMTRDAATALRMLRERPGDFDLVISDVHMLDMDGFKLLELIGLEMDLPVIMQSANGELETMMKGVTHGACDYLVKPVSLKDIQNIWQHVWRKRKLDIRNHNGGYNDGGELVGATRTKRKYTRKMRNDGDNYGENKENMDSTLKRQRVVWTPELHRDFVIAVHELGVDRAVPRKILRMMKVDYMTRENIASHLQKYRLYLKRISTQTGMDPDQFPEKWKYMNELDALKNYCENGRYRLTPAIASSSSSNPFARMNSASALATNGFLPTHSVQLKNSQRNMAMGTVGHGGSPGNNPVFQPLQNSSNARKCFPSGPSGSSFANISNGLVLDTDDSGSSYAGMFCKSMWETSNGSPSCHSGNSSANKSNNGVSAPANQFQVQSKFGFSALANQFPVQSNCGFSAPANQYQVQSNGGFSVPANQFPVQSNGEFLAPTNQFPVQYPEVNNQPLVQMNQSSTNHFSTIGNDYQFPDLANCSKYWQPTAPSMFPDLGHNDGTSFRPSQANIANINQLSSFAASSGQEPMFGDELHGQMSPIMSTISLSDFDDQMGSFNIGNDTSPAEMMHDNFSLGSDSNISSSTPTDSSFGSTFPDFHLDSPEMPAQMLNGGDEDGILLPVLDDTVDQQDLFDQLDENNGREKLGSGRCVRKGPFECFF

SEQ ID NO: 1780 - protein, 256 aa, Selaginella remotifolia
ETWLVTTTSSSNPEVGLATGLAATGGAQDLLNPPLNKQKEPPVGRGKIEIKRIENATSRQVTFSKRRGGLLKKAHELSVLCDAQVALIIFSSTGKLFEYASTSMKEILDRYGKYPESVQGGNMASHHEASDFISHEIRRLKQQLQRSQQSRRHLLGDDLSHLPIKDLQNLEQQLEVGLSRVRSRKDQVLMDQVDELRRRELTLHKDNEMLRRRLSDVQGMAESGRSTLIVNPWRQGNLLQTWQMYPCHFLDTKAAA

SEQ ID NO: 1781 - protein, 306 aa, Solanum tuberosum
MDPTNEGNNLNNNPSLASKQRLRWTHELHERFVDAVAQLGGPDRATPKGVLRVMGVQGLTIYHVKSHLQKYRLAKYLPDSSSDGKQSDKKESGDMLSSLDGSSTGVQINEALKLQMEVQKRLHEQLEVQRQLQLRIEAQGKYLKKIIEEQQRLSGVLSEVPVSGVTPSAAGDNGVDSDNRTDPGTPAPTSESPHIDTSVQEHARSKSLSIDQSFSSQHEPLTPDSGCRETSPINSSEGERSSKKQRVGTSATFTKADMLLPHQILESSLGSPYEQPNPVFLASDQFNLSSGLSLGNEGPNVSGSNV

SEQ ID NO: 1782 - protein, 137 aa, Brassica napus
  misc_feature (107)..(107): Xaa can be any naturally occurring amino acid
LSLTSPTLPLSFYACESVVEMFSSGLRVLVVDDDPTCLTILERMLRACSYEVTKCNRAEMALSLLRKNKHGFDIVISDVHMPDMDGFELLEHIGLEMDLPVIMMSAXDNSKSVVLKAVMYGAVDYLIKPVRIEALQN

SEQ ID NO: 1783 - protein, 148 aa, Brassica napus
LSCLFPDRIFAAPHKMPLSGSLLSRRFSISSRDHQGHTPTEPESPMLPPSSNVTGSSWSAMLPELLSEIIRRVEDTEDHWPLRRDVVACACVSKKWREITQETVRSPRNSGKITFPSCLKLPGPRDFSNQCLIKRNKRTCTFYLYLPL

SEQ ID NO: 1784 - protein, 304 aa, Lycopersicon esculentum
MESGNASMENNNVNDIGLINFLDEDNFEQFIELIRGETADPIVNFCPNYDCEHMTGCFSAANAQFEPILSSMDFYDTTLPDPISLYNCEIKLDNNDDEDDDESSGTTATTKMTPTSKGTRTDRSRTLISERKRRGRMKEKLYALRSLVPNITKMDKASIIGDAILYVQGLQTKAKKLKVEIAEFESSSGIFQNAKKMNFTTYYPAIKRITKMDINQVEEKGFYVRLICNKGRHIAASLFKALESLNGFNVQTSNLATSTNDYIFTFTLYVRECHEVDINFGNLKLWIASAFLNQGFDFETSPLV

SEQ ID NO: 1785 - protein, 186 aa, Magnetospirillum magnetotacticum MS-1
MLPAPPIGNDASLVTGTVILGTDIPVLVLDPDGLIDRLGRAGPRAARPQPGAHDPGNGTMPEKRRSTILVVDDSITTRTLEKSILEAAGYRVIVCVDGQEALDRLRARIEPVDLVVADVEMPRLTGFGLVEALRAEEDFARLPIVLMTSRGDEEDVARGLQLGADAYLTKQKFDQRELLDTIGQLL

SEQ ID NO: 1786 - protein, 256 aa, Jatropha curcas
MSYSNPDPPDPDPNPLPESKWIQFPEFPHPKPTWLNFLGPKPVPMKQVGSPPKPTKLYRGVRQRHWGKWVAEIRLPKNRTRLWLGTFDTAEEAALAYDKAAYKLRGDFARLNFPNLRHQGSHIEGSFGEYKPLHSSVDAKLQAICQSLAESQKQGGKAEKQSNSSAKKKTSVGTTPATAEKVKEAKAPQQVVPDKCCKVETPSSVLTESEASGGSSPLSDLTFPDLEEAPLDVDSGNFNLEKYPSYEIDWASLLSS

SEQ ID NO: 1787 - protein, 231 aa, Triticum aestivum
  misc_feature (156)..(156): Xaa can be any naturally occurring amino acid
  misc_feature (221)..(221): Xaa can be any naturally occurring amino acid
MARGKVQLRRIENPVHRQVTFCKRRAGLLKKARELSVLCDADIGIIIFSAHGKLYDLATTGTMDGLIERYKSASGEGMTGDGCGDQRVDPKQEAMVLKQEIDLLQKGLRYIYGNRANEHMNVDELNALERYLEMWMFNIRSAKMQIMIQEIQALKXSKEGMLKAANEILQEKIVEQHGLIDVGLTIADQQNGHFSTVPMLEEITNPLTILSGYSTCRGSEXGLFLLMVITP

SEQ ID NO: 1788 - protein, 181 aa, Oryza sativa
MEARRPTPTRRSRSAEFHNFSERRRRDRINEKLKALQELLPNCTKTDKVSMLDEAIDYLKSLQLQLQMLVMGKGMAPVVPPELQQYMHYITADPSQIPPIRPSEPRPFQITHATQQRQSNVESDFLSQMQNLHPSEPPQNFLRPPKLQLYTPEQQRRGLASSSGHNSGWITERNSSYNFLE

SEQ ID NO: 1789 - protein, 272 aa, Oryza rufipogon
MGRRACCAKEGMKRGAWTSKEDDVLASYIKSHGEGKWREVPQRAGLRRCGKSCRLRWLNYLRPNIKRGNIDDDEEELIVRLHTLHGNRWSLIAGRLPGRTDNEIKNYWNSTLSRKIGTAATAAAGSRGGSTPDTARATDAASSSSVVPPGQQLQPASRADTDTATAAAAAAATTTTVWAPKAVRCTRGFFFHDRETAPLAAAAPAPAGELGDGDDVDCDYYCSGSSSAATTTSSSSLPAVVEPCFSAGDDWMDDVRALASFLDTDDAWNLCA

SEQ ID NO: 1790 - protein, 270 aa, Oryza glaberrima
MGRRACCAKEGMKRGAWTSKEDDMLASYIKSHGEGKWREVPQRAGLRRCGKSCRLRWLNYLRPNIKRGNIDDDEEELIVRLHTLLGNRWSLIAGRLPGRTDNEIKNYWNSTLSRKIGTAATAAAGSRGGSTPDTARATDAASSSSVVPPGQQQQPASRADTDTATAAAAATTTTVWAPKAVRCTRGFFFHDRETAPLAAAAPAPAGELGDGDDADCDYYCSGSSSAATTTSSSSFPAVVEPCFSAGDDWMDDVRALASFLDTDDAWNLCA

SEQ ID NO: 1791 - protein, 110 aa, Lolium perenne
MGRSPCCEKMGLKRGPWTAEEDKILVAHITSFGHGNWRALPKQAGLLRCGKSCRLRWINYLRPDIKRGNFSDEEEQSIIQLHQLLGNRWSAIAARLPGRTDNEIKNYWNT

SEQ ID NO: 1792 - protein, 269 aa, Oryza glumipatula
MGRRACCAKEGMKRGAWTSKEDDVLASYIKSHGEGKWREVPQRAGLRRCGKSCRLRWLNYLRPNIKRGNIDDDEEELIVRLHTLLGNRWSLIAGRLPGRTDNEIKNYWNSTLSRKIGTAAAGSRGGSTPDTARATDAASSSSVVPPGQQQQPASRADTDTATAAAAAAATTTTVWAPKAVRCTRGFFFHDRETAPLAAAAPAPAGELGDGDDVDCDYYCSGSSSAATTTSSSSLPAVVEPCFSAGEDWMDDVRALASFLDTDDAWNLCA

SEQ ID NO: 1793 - protein, 398 aa, Oryza sativa
MAKQSCCHKKKLRRGLWSPEEDEKLMNHIAKYGHGCWSSVPKLAGLERCGKSCRLRWINYLRPDLKRGTFSQEEEDLIIQLHSMLGNKYVLYSSSTHICQSLSRSVPSLTMAAATATALARWSQIAAQLPGRTDNEVKNFWNSYIKKKLRDRGIDPATHKPLAADSSATPTNTTAAAASRSTATCRAVFSDAELQIPTAAAVQQQQQAPLVGAMQLVDGIKMPLDDYWPAAAAAAAPSSSTTTFSAYHHALSMQQQAAAGCGAAAAFDMDALSHCGVVVAPSASSSSTLTSMAGLSPAAADAAEQSANVAAAAAATTTNLPWLDLGHANPIATMDHYAGVLDELRWSDYFDGAYQAATTATQGGALQGQCLYDGGGGGGKDVDDAVQFVDVHSLSNWC

SEQ ID NO: 1794 - protein, 217 aa, Populus tomentosa
MEEGRFQNGGGLGAKVMTDEQMEMLRKQISVYATICEQLVEMHKVVSAQQDFAGMGLGNPYCDPLLSSAVHKIGSRQRWTPKPAQLQILEQIFEQCNATPGRQKIKDITRELAQHGQISETNVYNWFQNRRARSKRKQSAVVPNNGESEMETDIESLKEKKTRAEDSQPDENTTPMADHMYFNSPDIGFDQLMGKIESPGPGSCIPYWQMEQYDLFG

SEQ ID NO: 1795 - protein, 348 aa, Brassica rapa subsp. pekinensis
MDQWFYLFPAEDSHLHHRDNALTPPSSSLMPSFSREMEMSAIVSALTHVVSGNVPPHQFVGGGEGTSNSSSSSGQKRRREVEEGGGGGKSVKAANTLTVDQYFSGGNSSSRVREASSNMSGSGPTYEYTTTTTTNTETSSLNGDQQPRRRYRGVRQRPWGKWAAEIRDPFKAARVWLGTFDNAESAARAYDEAALRFRGNKAKLNFPENVKLVRPATTQSVQQTTAVQTPTQFRNSTSTSTLLPLRPAVDSQPLIQPYNLSYSEMARHQQQFQQHNQQTMDLYDQMSFPLRFGYTGDSMMQSTSSSSSHSRPLFSPAAVQPSETGYLQDIQWSPDKTSNHNYNNSSSS

SEQ ID NO: 1796 - protein, 444 aa, Geobacter sulfurreducens PCA
MQGLVLIVDDEPNAARVLSAILAGEGHTVLTASDASKAEHILKSRDVDAIITDLRMPGRDGMQLFEHVTEHLPDIPVIFLTAYGTVDSAVNAITRGAFYYFIKPPDYVKLKSMVARAVEQRALKREVAELRKRVAAGSGADRIIGVSPGMLKIFNTIEAVKDSMSSVLVSGETGTGKELIARSLHYGSVRRDRPFVAVNCAAIPRELMESELFGYEKGAFSGASARRIGRFEAAADGTIFLDEISELELSLQAKLLRVLQEKEVERLGSNRKIKVNFRVISSTNRDLMREIAAGTFREDLYYRLNVVQLNVPSLRERREDIPLLVSEFVKEFGLREGKSLTLSDDVLRALVGYEWPGNIRQLRNTIERAVVLARGAKITLKHLPEEVAAGAGCRDVAEPRTLRELEEEAIQSALRECRGNKSLVAKKLGISRKTLYKRLEQLGL

SEQ ID NO: 1797 - protein, 249 aa, Oryza sativa (japonica cultivar-group)
MGRGRVELKRIENKINRQVTFSKRRNGLLKKAYELSVLCDAEVALIIFSSRGKLYEFGSAGINKTLEKYNSCCYNAQGSNSALAGGEHQSWYQEMSRLKTKLECLQRSQRHMLGEDLGPLSIKELQQLEKQLEYSLSQARQRKTQIMMEQVDDLRRKERQLGELNKQLKNKLEAEADSSNCRSAIQDSWVHGTVVSGGRVLNAQPPPDIDCEPTLQIGYYQFVRPEAANPRSNGGGGDQNNNFVMGWPL

SEQ ID NO: 1798 - protein, 587 aa, Arabidopsis thaliana
MKRDHHQFQGRLSNHGTSSSSSSISKDKMMMVKKEEDGGGNMDDELLAVLGYKVRSSEMAEVALKLEQLETMMSNVQEDGLSHLATDTVHYNPSELYSWLDNMLSELNPPPLPASSNGLDPVLPSPEICGFPASDYDLKVIPGNAIYQFPAIDSSSSSNNQNKRLKSCSSPDSMVTSTSTGTQIGGVIGTTVTTTTTTTTAAAESTRSVILVDSQENGVRLVHALMACAEAIQQNNLTLAEALVKQIGCLAVSQAGAMRKVATYFAEALARRIYRLSPPQNQIDHCLSDTLQMHFYETCPYLKFAHFTANQAILEAFEGKKRVHVIDFSMNQGLQWPALMQALALREGGPPTFRLTGIGPPAPDNSDHLHEVGCKLAQLAEAIHVEFEYRGFVANSLADLDASMLELRPSDTEAVAVNSVFELHKLLGRPGGIEKVLGVVKQIKPVIFTVVEQESNHNGPVFLDRFTESLHYYSTLFDSLEGVPNSQDKVMSEVYLGKQICNLVACEGPDRVERHETLSQWGNRFGSSGLAPAHLGSNAFKQASMLLSVFNSGQGYRVEESNGCLMLGWHTRPLITTSAWKLSTAAH

SEQ ID NO: 1799 - protein, 768 aa, Castanea sativa
MDTYSSGEELVIKARKPYTITKQRERWTEDEHNRFLEALKLYGRAWQRIEEHIGTKTAVQIRSHAQKFFSKLEKEALVKGVPIGQALDIDIPPPRPKRKPSNPYPRKTSIGVPTSQVGTKDGKLFTSASSSDCKQALDLEKEPLPEKPNGDEKPENAKDNQDDNCSEVFTLHQEVHCSSVSSANRSSVPTPVALRNLNTLREFVPSMKRSITQDETNESYVTIELKGNQKLEKADAKQTIQDTGTSNGSKLGNHNVLHEKPIQGDKTQDLNCALPMDEMQATQNYPRHVPVQVVDGSLGTCTQTPSSDMSFQDSIFHPMGEVHRHHNPFTNPAASATTEHQNNVPRSVNQSFPAFHPPFTPIRHNQDDYQSFLHMSSTFSSLIVSTLMQNPAAHAAASFAATVWPYANVEASADSPASTQGVFPPRQMGSTPSMAAIAAATVAAATAWWAAHGLVPLCAPLPTAFTCNPASTAAVPPTDSGQAPAAKTEGEVNTLQTPPLQQLDPEYSEAVQAQHSDSKLPIPSSSDSEESGGAKLNSGPKATDHENAVTATELHDSNKTKGRKQVDRSSCGSNTASSSDRETDALEKQEMGKEEPKEPDANHSAADTSNRRCCSSSSRSFSYMNDSWKSVSEEGRLAFQALFSREVLPQSFSPPHDLKNMGNQKDNTTDDKQNANENDGNASLLDLNSQKSGSCSVQQGILNFEPNNNGEGLLTIGLAYGKLKARRTGFKPYKRCSVEAKENRVANASGQGEEKGPKRIRLEGEASI

SEQ ID NO: 1800 - protein, 327 aa, Triticum aestivum
  misc_feature (129)..(129): Xaa can be any naturally occurring amino acid
TRPRRDKSTLTYYLYLCLSPAVLSENGKFLLAAKRNRRTTYTEYVISVDSKNISRSSNGYVGKMRSNFLGTKFIVYDTQPPYNAGSLVPCQRGSRRISSRRVSPKVPTGSYPIAQVNYELNVLGTRGPXRRMQCTMHSIPASAVDPDGVVPGQPQQLLPGPFDESFRSTNASSRFSMADFSSSRFSSSRFSDVSGGLRREEEDGEAKERPLVLRNKVPRWHEQLQCWCLNFRGRVTVASVKNFQLTAAAPQVAAAALPPSEPSQPPQQQQLQPSSSSSSSTSDHEKVILQFGKVTKDMFTMDYRYPLSAFQAFAICLTSFDTKLACE

SEQ ID NO: 1801 - protein, 152 aa, Oryza sativa (japonica cultivar-group)
WGGEGAGQVLPIANISRIMKKAIPANGKIAKDAKETVQECVSEFISFITSEASDKCQREKRKTINGDDLLWAMATLGFEDYIEPLKVYLQKYREMEGDSKLTAKAGDGSVKKDVLGSHGGSSSSAQGMGQQAAYNQGMGYMQPQYHNGDVSN

SEQ ID NO: 1802 - protein, 254 aa, Triticum aestivum
GDNSLVDMACATLDEEDKQKSVIGSSSEAALNLLPPANNQTAVSVDSTTAKYTPDKHMFSKDSIYEDFSMDDIDLSYENYEELFGNSHIQTEELFDDAGIDSYFEVKEATAVNFDEQPKPKQPAASNALSADSGMSNPAVKEDDSSLCIPVRQAISYSGFTGESIPEEYQDCGVSPMLLMGEPPWLPPGPDGSFAGIRDSAITRYKEKKKRRKFDHKIRYESRKARADVRKRVKGRFVKAGEAYDYDPLDTRSY

SEQ ID NO: 1803 - protein, 519 aa, Triticum aestivum
MPMLPSSFTTSSSWQSHQDASSICTNQELDYDHPYYFGIEEVAVDADELELGLRAHKATRVDYLSSPYQASWPSAQADLESSRVRKTKQFRDVLETCKQKVEAMEAMERSSSPVGSGGFEEQGEAVVAVDDVRGGGGGSGADGMRLVQLLVACAEAVACRDRAQAAALLRELQVGAPVHGTAFQRVASCFVQGLADRLALAHPPALGPASMAFCLPRSSCLDGARGEALAVAYELCPYLRFAHFVANTSILEAFEGESNVHVVDLGMTMGLNRGHQWRALLDSLATRACGKPARVRVTGVGARVDTMRAVGRELEAYANELGITLEFMAVDRTLESLHVDDLGVEADEAVAINSVLELHCVVKESRGALNSVLQTIRKLSPKAFVLVEQDAGHNGPFFLGRFMEALHYYAALFDALDAALPRYDARRARVEQFHFGAEIRNVVGCEGAARVERHERADQWRRRMSRAGFQSMPFKMAAKAREWLEENAGGSGYTVAEEKGCLVLGWKGKPVIAASCWKC

SEQ ID NO: 1804 - protein, 405 aa, Pisum sativum
MLEQKFLTTTSATVRSAVTWPRTCDTCRSAPCAVFCRADSAYLCAGCDARIHAANRVASRHERVWVCEACERAPAAFLCKADAASLCSSCDADIHSANPLASRHQRVPILPISGYLYGPPTTLLGADDEGFVRGGGDAEEEEDEGADMEDENEAASWLLLNPLKNNHHNINNHNNNNNSNDHNQEGNNNGFLFSGEVDEYLDLVDCNSCGGGENTFTTNNTHDHDYSRDQQQQRQDHYGVPQKNYVGDSVVPVQQQHLQNFQLGLEFESSKAGFSYNGASISQSVSVSSMDVGVVPESTMRDATTMSYSRPSKGTIDLFSAPPIQMTSHFSPMDREARVLRYLEKKKTRKFEKTIRYASRKAYAETRPRIKGRFAKRTDVEAEVDQMFSTTLITEVGYGIVPSFV

SEQ ID NO: 1805 - protein, 304 aa, Solanum tuberosum
MAANQPEAYADDFLEQILAIPSYSGLPVADVGTPSETTSFTSASAVSHLNSAAAAGLQQPLFPLGLSLDNGRDDVSEAGAYAVKHERDGMNIGNLYAGLEHLQSHAVRHSVPSIHHVQPFQGPPTTSTTVTVPHPPSIRPRVRARRGQATDPHSIAERLRRERISERIKALQELVPSCNKTDRAAMLDEILDYVKFLRLQVKVLSMSRLGGASAVAQLVADIPLQSVEGDSGESRSNQHIWDKWSNVDTEREVAKLMEEDVGAAMQYLQSKSLCIMPISLAALIYPTQLPDDQSLVKPEAAAPS

SEQ ID NO: 1806 - protein, 532 aa, Arabidopsis thaliana
MKRDHHHHHQDKKTMMMNEEDDGNGMDELLAVLGYKVRSSEMADVAQKLEQLEVMMSNVQEDDLSQLATETVHYNPAELYTWLDSMLTDLNPPSSNAEYDLKAIPGDAILNQFAIDSASSSNQGGGGDTYTTNKRLKCSNGVVETTTATAESTRHVVLVDSQENGVRLVHALLACAEAVQKENLTVAEALVKQIGFLAVSQIGAMRQVATYFAEALARRIYRLSPSQSPIDHSLSDTLQMHFYETCPYLKFAHFTANQAILEAFQGKKRVHVIDFSMSQGLQWPALMQALALRPGGPPVFRLTGIGPPAPDNFDYLHEVGCKLAHLAEAIHVEFEYRGFVANTLADLDASMLELRPSEIESVAVNSVFELHKLLGRPGAIDKVLGVVNQIKPEIFTVVEQESNHNSPIFLDRFTESLHYYSTLFDSLEGVPSGQDKVMSEVYLGKQICNVVACDGPDRVERHETLSQWRNRFGSAGFAAAHIGSNAFKQASMLLALFNGGEGYRVEESDGCLMLGWHTRPLIATSAWKLSTN

SEQ ID NO: 1807 - protein, 175 aa, Triticum aestivum
  misc_feature (53)..(53): Xaa can be any naturally occurring amino acid
  misc_feature (59)..(59): Xaa can be any naturally occurring amino acid
  misc_feature (70)..(70): Xaa can be any naturally occurring amino acid
  misc_feature (98)..(98): Xaa can be any naturally occurring amino acid
  misc_feature (101)..(101): Xaa can be any naturally occurring amino acid
  misc_feature (104)..(104): Xaa can be any naturally occurring amino acid
  misc_feature (131)..(131): Xaa can be any naturally occurring amino acid
ACSSAPCRTHLTPGRQEQDSHCPTEPEALRSERAGAPPSPMARPQQRYRGVRXQRHWGXSWVSEIRHPLXLKTRFWAGAPSETAEDAARAYDEAARIXMCXPRXVRTNFPEDARRPTDRGNPAATGFLSPXAPRQLPRFNLASVQAAPGRADDPRPSPRRRLERSRPCLQPANPP

SEQ ID NO: 1808 - protein, 216 aa, Triticum aestivum
MSPLACGFEADRSRRRAMPDSDNEDSGNAGGELSSPREQDRFLPIANVSRIMKKALPANAKISKDAKETVQECVSEFISFITGEASDKCQREKRKTINGDDLLWAMTTLGFEDYVDPLKHYLHKFREIEGERAAATSTSTTPDMPRNNNNATGYADAPGGMMMMGQPVYGSPPPPQQQQQHQHQIAMGGRAGFPYHGGGGGGGGSSSSSGFGRKEG

SEQ ID NO: 1809 - protein, 358 aa, Arabidopsis thaliana
MCGGAIISDFIPPPRSRRVTSEFIWPDLKKNLKGSKKSSKNRSNFFDFDAEFEADFQGFKDDSSIDCDDDFDVGDVFADVKPFVFTSTPKPAVSAAAEGSVFGKKVTGLDGEAEKSANRKRKNQYRGIRQRPWGKWAAEIRDPREGARIWLGTFKTAEEAARAYDAAARRIRGSKAKVNFPEENLKANSQKRSVKANLQKPVAKPNPNPSPALVQNSNISFENMCFMEEKHQVSNNNNNQFGMTNSVDAGCNGYQYFSSDQGSNSFDCSEFGWSDQAPITPDISSAVINNNNSALFFEEANPAKKLKSMDFETPYNNTEWDASLDFLNEDAVTTQDNGANPMDLWSIDEIHSMIGGVF

SEQ ID NO: 1810 - protein, 272 aa, Lycopersicon esculentum
MEKVNFLKNGVLRLPPGFRFRPTDEELVVQYLKRKVFSFPLPASIIPEVEVYKSDPWDLPGDMEQEKYFFSTKEVKYPNGNRSNRATNSGYWKATGIDKQIILRGRQQQQQLIGLKKTLVFYRGKSPHGCRTNWIMHEYRLANLESNYHPIQGNWVICRIFLKKRGNTKNKEENMTTHDEVRNREIDKNSPVVSVKMSSRDSEALASANSELKKKASIIFYDFMGRNNSNGVAASTSSSGITDLTTTNEESDDHEESTSSFNNFTTFKRKIN

SEQ ID NO: 1811 - protein, 372 aa, Glycine max
FGSRQNPAAHAAASFAATFWPYANAETSADSPVCTPDFPSRQIGSPPSVTAIAAATVAAATAWWAAHGLLPLCGPLHTAFACPPASATTVPSMIIDESPQKTERGEIKPQNPPLQDQIPDPEHSEAQHSAPKSPAVSSSKSEDRGDANLDTSPKATNHEMNQAISENPDSNKMKGRKPVDRSSCGSNTTSSSEETELLEKDEKEKEEPKTPDANVLDTELSNRRSRSISNLTDSWKEVSEEGRLAFQALFSREVLPQSFSPTHHLINKDNQIDSIKDNELNTDYKDEDLESKKCSSICDGVQKNLLFVKDNNEEEGLLTIGLGPGKLKTRRTGFKPYKRCSVEANENRIGTACIQGEEKGPKRLRLNGEAST

SEQ ID NO: 1812 - protein, 313 aa, Medicago truncatula
MHSLFLPNTNATTLTSSLLFLNTNNNFSSKARFQCSIKATNPNTKQVTNSNKKVIILWDLDNKPPHGPPYNAALSLKTFAERFGDVVSISAYTKRHSFFNLPLWNPNPNPNSFLCRVCGYECRSLTDVNIHFKRVHEYQKRKTLNRLKSIKLKRSKVNFIRKVHRYNEAKSNNAPLKVGFGMASELRRGGVFVKIVTVRGKVKAADSSLKREMMSGGVDSLVLVLVSDDSVFSKMLRKVREVKVETVVVGDYWGRDLGRNADLWLPWILVENGNVEYLMGGTVEEDLDDELEEDENIYDYDDYDYDDDGFYVY

SEQ ID NO: 1813 - protein, 378 aa, Fagus sylvatica
MCGGAIISDFIAPTGSRRLTADYLWGDRKKPISGKRFSKPVVDLDDEFELDFQGFKDEEESDIDEEEVLVQDVKPFTFSAPPSSGSKPVKSVEFNGQAEKSAKRKRKNQYRGIRQRPWGKWAAEIRDPRKGVRVWLGTFNTAEKAARAYDAEARRIRGKKAKVNFPDETPRASPKRSVKANLQKPLAKANLNSVQPNLNQNFNFMNNSDQDYTMGLMEEKPFTNQYGYMDSIPANADVGLKPFASNNTTPYFNSDQGSNSFDCSDYGWGEQGSKTPEISSVLSATLEGDESQFVEDAMPTKKLKSDSGNAVFIENNTAKTLSEELSAFESQMNFQMPFLEGSWESNMEALFSGDTTQDGNSMDLWSFDDLPVMAGGVL

SEQ ID NO: 1814 - protein, 264 aa, Humulus lupulus
MGRAPCCDKTKVKRGPWSPEEDAALKHYMHNNGTGGNWIALPHKAGLNRCGKSCRLRWLNYLRPDIKHGGFTEEEDNVVWTLYSNIGSRWSVIASQLPGRTDNDVKNHWNTKLKKKLLARSTNCNETTNTTDHLNLARFSPLIPKTENSDQGNSAYCYTNSDTLPYLMNGNCVQNFDLKKPSKPSYSSNPVQVSDFGTNGNTSSSISSTREASSLSTSSSTLAMENYTNFASWSGTGIESTEDGILVDLGFDSSNDVFLSGFGF

SEQ ID NO: 1815 - protein, 201 aa, Lycopersicon esculentum
MARGKVQMKRIENPVHRQVTFCKRRAGLLKKAKELSVLCDAEVGLFIFSAHGKLYELATKGSMQGLIERYIKSTKGVEVAEEAKDTQPLDPKEEINMLKNEIDVLQKGLSYMYGGGAGTMTLDELHSLEKYLEIWMYHIRSAKMDIMFQEIQLLKNKGGILEAANKYLQDKIDEQYTVTNMTQNLTDFQCPLTVQNEIFQF

SEQ ID NO: 1816 - protein, 312 aa, Pisum sativum
MATKLCDSCKSTKATLFCRSDSAFLCITCDSNIHAANKLASRHHRVTLCEVCEQAPAHVTCKADAAALCVSCDHDIHSANPLASRHERIPLNTFHHNSKQQFFSESDPDADVSTEEAEAASWLLQTPANPKGPDLNSSHYSFTEIDATDLNFVCVDAKTDSPEQHSPGTADGVVPVQSHSKTVTEHYSDINNDFSTSKPFTYNYNHSVSSPSLEVGVVPDGNVMSEMSYCGYGRTEAVQITAADREARVMRYREKRKNRRFEKTIRYASRKAYAETRPRIKGRFAKRTDLNMNVNLIGEDESYDGYGVVPSC

SEQ ID NO: 1817 - protein, 503 aa, Glycine max
  misc_feature (233)..(233): Xaa can be any naturally occurring amino acid
MASSSSNGSSSGSKSWDIDGDLAGFGYKVRSSELQHVAENMERLENVMDIVNSSTNNNISQLASDTVFYNPSDIGSWVDTLLSEFDQTASLPYDFSELPDLDTDQIQNLKPTLVTMEEDSGIRLVHTLMTCADSVQHGDLPFAGSLIENMQGLLAHVNTNIGIGKVAGYFIDALRRRIFAQGVFLTSCSYPIEDDVLYHHYYEACPYLKFAHFTANQAILEAFNGHDCVHVIXFNLMQGLQWPALIQALALRPGGPPLLRLTGIGLPSSDNRDTLREIGLRLAELARSVNVRFAFRGVAAWRLEDVKPWMLQVNPNEAVAVNSIMQLHRLLASDSDPAGSGIETVLGWIRSLNPKIISVVEQEANHNEDMFLERFTEALHYYSTVFDSLEACPVEPDKALAEMYLQREICNVVCCEGPARVERHEPLDKWRKRLGKAGFKPLHLGSNAYKQASMLLTLFSAEGYCVEENQGCLTLGWHSRPLIAASAWHAAPVQDRETLRFEQ

SEQ ID NO: 1818 - protein, 146 aa, Sophora tetraptera
VTFSKRRAGLLKKAHEISVLCDAEVALIVFSNKGKLFEYATDSCMEKILERHERYAYAERQLEANNSETQGNWTIEYTRLKARIDLLERNHRHYMGEDLGSMSLKELQSLEQQLDTALKTIRTRRNQLMYESISELHKEEKVIQEQ

SEQ ID NO: 1819 - protein, 545 aa, Arabidopsis thaliana
QNYSHLSQVEKEAEAKGVAMGQALDIAIPPPRPKRKPNNPYPRKTGSGTILMSKTGVNDGKESLGSEKVSHPEMANEDRQQSKPEEKTLQEDNCSDCFTHQYLSAASSMNKSCIETSNASTFREFLPSREEGSQNNRVRKESNSDLNAKSLENGNEQGPQTYPMHIPVLVPLGSSITSSLSHPPSEPDSHPHTVAGDYQSFPNHIMSTLLQTPALYTAATFASSFWPPDSSGGSPVPGNSPPNLAAMAAATVAAASAWWAANGLLPLCAPLSSGGFTSHPPSTFGPSCDVEYTKASTLQHGSVQSREQEHSEASKARSSLDSEDVENKSKPVCHEQPSATPESDAKGSDGAGDRKQVDRSSCGSNTPSSSDDVEADASERQEDGTNGEVKETNEDTNKPQTSESNARRSRISSNITDPWKSVSDEGRIAFQALFSREVLPQSFTYREEHREEEQQQQEQRYPMALDLNFTAQLTPVDDQEEKRNTGFLGIGLDASKLMSRGRTGFKPYKRCSMEAKESRILNNNPIIHVEQKDPKRMRLETQAST

SEQ ID NO: 1820 - protein, 291 aa, Medicago truncatula
MECVKAEAALKSSFNISTAVKLTPQNLLEDLSSFNVQDIAPIDDFFVDDFLNFSNEEQEHEHEQDFLVEKQQNHTPQYTTQNQNQISHPILNNQFVSLPTTELTVPVEEAADLEWLSYFVEDSFSEFPKTENLQLQQKAHEPNPTFSTPCFKTPVPAKARSKRTRTGIRVWPISLANSSSTSSSATLSSSNLEECSKPAEKKAKRMVSPDGEARGVPRRCSHCGVQKTPQWRTGPGGPKTLCNACGVRYKSGRLLPEYRPACSPTFSSELHSNHHRKVIEMRRKKEVVPGF

SEQ ID NO: 1821 - protein, 586 aa, Oryza sativa (japonica cultivar-group)
MDATAFPYGLRVLVVDDDPTWLKILEKMLRKCSYEVTTCGLARVALDILRERKNKFDIVISDVNMPDMDGFKLLEHIGLEMDLPVIMMSIDGETSRVMKGVQHGACDYLLKPVRMKELRNIWQHVYRKKMHEVKEIEGNDSCDDLQILRNSFEGLDEKSLFMRSDSDTMRKRKDVDKDHADQESSDGNTVKKARVVWSVDLHQKFVNAVNQIGFDSECSPKGPKKILDLMNVPGLTRENVASHLQKYRLYLSRLQKQNEERILGAARQDFSHKGTSENLNLRSSFQEQPSNIANGYPHASQNIQTQANMLDSQLEDTKSTVPLPVPDKKRTLASDAADSQNVTSASSLGGVLSFKSMPVNQDRKPSETMILECQAWTGGIPSKQFMQYPKHNHERCDLLGDYSCLPKPDLEHPVGPSNLYAPPPLISMSCGMEGDARDFSDVKPAIMDCIKSLSPALTCTVDSVSVQLSDSVVTSIDGDLKSSGVDGLPSIKDCCLDQTNSQGSLRPSQEPSIIGSTELASLPEDLPSYPLHGVSLENIGLSSIDLLNYSDAMILSGLQSNWYDDLEFSSEMMDYPSIDECLFASS

SEQ ID NO: 1822 - protein, 427 aa, Antirrhinum majus
MGGAGGGGESSNNTTHNHTTTTTSSRLGLRNSVGGEIVEVQGGHIVRSTGRKDRHSKVCTAKGPRDRRVRLAAHTAIQFYDVQDRLGYDRPSKAVDWLIKKAKSAIDELAQLPAWDPTACSVAATNSSFKHEEEQQQMGIDMQQQQQQNDMMMSNEQQQQQGLHNNAVVSNQDSNFLPPSLDSDAIADTIKSFFPMGASNEASSTAMQFQSFTTSDLLSRTTSHSHSQDLRLSLQSFQDPIMLHHHHNQSQQHQNHHSEQPHSQSHHVLLSGTPLGFDSGWQEHQHQQAAELSRFQRFAAWNPSGESGGGGASASSYLFNSPPPQAPQPLLQQLLSHNNQFFSQRGPLQSSNTPSVRAWMDPASAMADHSHHQSNVPIYPSSISGIGFSSGVGGFPGFHIPARIQGDEEEHDGYSDKPSSASSESRH

SEQ ID NO: 1823 - protein, 409 aa, Glycine max
MGYICDFCGDQRSMVYCRSDAACLCLSCDRNVHSANALSKRHSRTLLCERCNSQPAFVRCVEEKISLCQNCDWLGHGTSTSSSTHKRQAINCYSGCPSAAELSSIWSFVLDIAAISESTCEQELGLMSINENKCVGVPPEDQNVSGSDEVTDLPALNKSLVGASLMPESSSEPCILDQPAGPTNECLPKLYCPATKCPALSEDDNLYDDFNMDEVDLDLENYEELFGMALSHSEELFENGGIDSLFGTKGMSAGDSNCQEAIAAEGSSVGQVNAMQPACSNAASADSILSTKTEPILCFTGRQTQSNLSFSGVTGESSAGDYQDCGASSMLLMGEPPWFAPCPENSLQSANRSNAVMRYKEKKKTRMFDKKVRYASRKARADVRRRVKGRFVKAGDVYDYDPLSTTRSC

SEQ ID NO: 1824 - protein, 116 aa, Schizosaccharomyces pombe
MSADGLDYTNLLPIANVARIMKSALPENAKISKEAKDCVQDCVSEFISFVTGEASEQCTQEKRKTITGEDVLLALNTLGFENYAEVLKISLTKYREQQARSASMKETKQSRSEEPQ

SEQ ID NO: 1825 - protein, 184 aa, Arabidopsis thaliana
MNGRSMRLPPGFRFDPDDEDLVFEYLAKKVLHRPMDFDLPELRSCNVDPWDLLGEKNKEVYYFVKKEERERKGRETLSGYWEECEEEEVMEAGGRDCIHLEGRRKTFAFFIGKKPRGTITPWIMYEFRLLSSRATRWSSSPLPRGEVGKWRAVKVVVKEENDEEMVEDEHESDESDGEEVIQSR

SEQ ID NO: 1826 - protein, 753 aa, Oryza sativa
MEINSSGEEAVVKVRKPYTITKQRERWTEAEHNRFLEALKLYGRAWQRIEGLIARSMNGEEHKQGRHNPLEKEAINNGTSPGQAHDIDIPPPRPKRKPNSPYPRKSCLSSETSTREVQNDKATISNMTNNSTAQMAGDAALEKLTYIQKLQRKEISEKGSCSEVLNLFREVPSASFSSVNKSSSNHGASRGLEPTKTEVKDVVILERDSISNGAGKDAKDINDQEMERLNGIHISSKPDHSHENCLDTSSQQFKPKSNSVETTYVDWSAAKASHYQMDRNGVTGFQATGTEGSHPDQTSDQMGGASGTMNQCIHPTLPVDPKFDGNAAAQPFPHNYAAFAPMMQCHCNQDAYRSFANMSSTFSSMLVSTLLSNPAIHAAARLAASYWPTVDGNTPDPNQENLSESAQGSHAGSPPNMASIVTATVAAASAWWATQGLLPLFPPPIAFPFVPAPSAPFSTADVQRAQEKDIDCPMDNAQKELQETRKQDNFEAMKVIVSSETDESGKGEVSLHTELKISPADKADTKPAAGAETSDVFGNKKKQDRSSCGSNTPSSSDIEADNAPENQEKANDKAKQASCSNSSAGDNNHRRFRSSASTSDSWKEVSEEVVVYQHSAYSHLSYSGNILHCFSNSHFCCQGRLAFDALFSRERLPQSFSPPQVEGSKEISKEEEDEVTTVAVDLNKNAAIIDQELDTADEPRASFPNELSNLKLKSRRPGFKPYKRCSVEAKEIRVPASDEVGTKRIRLESEASP

SEQ ID NO: 1827 - protein, 315 aa, Triticum aestivum
HYRTSLYKKAGWYRSGIPGISSTHAPRVRPRSGRNNMGSNDGPNSKASLAARQRLRWTDELHEQFVEAVTQLGGPDRATPKGVLRIMGTPGLTIYHVKSHLQKYRLAKYIPDSSADGNKADNKDPGDSLAGLDGSSGMQISEALKLQMEVQKRLHEQLEVQRQLQLRIEAQGKYLKKIIEEQQRFGGGGIKSETPGAGATVTVSSDQFPDSERTDPSTPAPTSESASQGAAFKRDSGSQTEAIKSPCHDEPLLTADSNCHPGSPTLSPKHERAAKRQRGSDAEFPEAELSLPQHIFESSSGPEFQQCSVPYYSGH

SEQ ID NO: 1828 - protein, 359 aa, Glycine max
MASDAKLSSSESLNGLKFGQKIYFEDVGLATPATSLTSSSSSSSAATVTSSSSSRKGRGGSVQPAQPPRCQVEGCKVDLSDAKAYYSRHKVCGMHSKSPSVIVAGLQQRFCQQCSRFHQLPEFDQGKRSCRRRLAGHNERRRKPPTSSLLTSRYARLSSSAFDNSGRGSNFLMELTSYPKLSLRNSLPTPRSSELAPGNQTSTLSWNGNSETSSDLFLQGSVGGTSFASPGHPPGESYIGVTDTSCALSLLSNQTWGSRNTAPSLGLSNMINFNGTPLTQLAASSHGASIHQLPNTSWFFKGIDSGNCSPEVVPDLGLGQISQPLNSQLHGELDLSQQGRRHYMDLEQSRAYESAHWSL

SEQ ID NO: 1829 - protein, 393 aa, Arabidopsis thaliana
MAFHNNHFNHFTDQQQHQPPPPPQQQQQQHFQESAPPNWLLRSDNNFLNLHTAASAAATSSDSPSSAAANQWLSRSSSFLQRGNTANNNNNETSGDVIEDVPGGEESMIGEKKEAERWQNARHKAEILSHPLYEQLLSAHVACLRIATPVDQLPRIDAQLAQSQNVVAKYSTLEAAQGLLAGDDKELDHFMTHYVLLLCSFKEQLQQHVRVHAMEAVMACWEIEQSLQSFTGVSPGEGTGATMSEDEDEQVESDAHLFDGSLDGLGFGPLVPTESERSLMERVRQELKHELKQGYKEKIVDIREEILRKRRAGKLPGDTTSVLKSWWQSHSKWPYPTEEDKARLVQETGLQLKQINNWFINQRKRNWHSNPSSSTVSKNKRRSNAGENSGRDR

SEQ ID NO: 1830 - protein, 94 aa, Nicotiana plumbaginifolia
QWREGPLGPKTLCNACGVRYRSGRLFPEYRPAASPTFIPTLHSNSHRKVVEMRKKAIYGETSALEEPHNVIVEGPPMSPAPEFVPMSSYLFDVY

SEQ ID NO: 1831 - protein, 203 aa, Triticum aestivum
  misc_feature (95)..(95): Xaa can be any naturally occurring amino acid
  misc_feature (138)..(138): Xaa can be any naturally occurring amino acid
MIMSDPAMLPPGFRFHPTDEELILHYLRNRAAESPCPVSIIADVDIYKFDPWALPSKASYGDREWYFFTPRDRKYPNGVRPNRAAGSGYWEATGXTDKPIRCSATAESVGVKKALVFYKGRPPKGIKTNWIMHEYRLXRADGHAGNTYRPMKFRNASMRLDDWVLCRIYRRPAQCRRWRCRRCPTTSLTSPLALAPAPCRAPA

SEQ ID NO: 1832 - protein, 250 aa, Solanum tuberosum
MGRGRVQLKRIENKINRQVTFSKRRSGLLKKAHEISVLCDAEVGLIVFSTKGKLFEYANDSCMERLLERYERYSFAERQLVPTDHTSPGSWTLEHAKLKARLEVLQRNQKHYVGEDLESLNMKELQNLEHQLDSALKHIRSRKNQLMHESISVLQKQDRALQEQNNQLSKKVKEREKEVAQQNQWDQQNHEINSSTFVLPQQLDSPHLGEAYQNTNVVDNGEVEGGNSSQQQGAANNTVMPQWMLRHLNG

SEQ ID NO: 1833 - protein, 478 aa, Ipomoea nil
MPLEGVFIEPSSRSNPLPDLSLHISPPNNTISSSRPSSCINELVAAAAGFDLPTNHRRHRQTDNNTSTSAAAAVYPELSLANPTATAAEENRFLRTGREQQQQHQTLQTYPQPYHLQTHTFQQNNSNSNNSSCSQMSNINHGVSLLDVSDGLRPIKGIPVYQNRSFPFLPMDRENKDPSKMCFYPMPPPPPPTASISHSPSPFFNPVVDHLSLLNNPSPSSSSSSAAAAAAAYRRFNGLSSAYQLPHNQYGGVGIGATAASHHHHHHPHHDAPPSHGMMMRSRFLPKLPAKRSMRAPRMRWTSTLHARFVHAVELLGGHERATPKSVLELMDVKDLTLAHVKSHLQMYRTVKTTDKPAASSGQSDGSGEEDLTVLGSTAAGGGGIRLMDQRGHPAAAVADGSSEPDFPNSTTTTLWSNSSSSREAWLQTNSSQESNGLIRSSSFPTQQRCGHPIDDCEKNPSLEFTLGRPDWVQKERD

SEQ ID NO: 1834 - protein, 214 aa, Zea mays; identical to SEQ ID NO: 99

SEQ ID NO: 1835 - protein, 261 aa, Arabidopsis thaliana
MEDGELDFSNQEVFSSSEMGELPPSNCSMDSFFDGLLMDTNAACTHTHTCNPTGPENTHTHTCFHVHTKILPDESDEKVSTDDTAESCGKKGEKRPLGNREAVRKYREKKKAKAASLEDEVARLRAVNQQLVKRLQNQATLEAEVSRLKCLLVDLRGRIDGEIGSFPYQKPMAANIPSFSHMMNPCNVQCDDEVYCPQNVFGVNSQEGASINDQGLSGCDFDQLQCMANQNLNGNGNGSFSNVNTSVSNKRKGGHRASRAV

SEQ ID NO: 1836 - protein, 134 aa, Oryza sativa
  misc_feature (52)..(52): Xaa can be any naturally occurring amino acid
MAKRAGGARKKLRRGLWSPEEDEKLMNHIAKYGHGCWSSVPKLAEIPICGCXGLERCGKSCRLRWINYLRPDLKRGAFSQEEEDLIIHLHSMLGNKWSQIAAQLPGRTDNEVKNFWNSYIKKKLRQRGIDPATH

SEQ ID NO: 1837 - protein, 302 aa, Solanum demissum
MCIMDQQQQEMSSQTLESMLVCTKPDQDQKKPRPAEQQPQKCPRCDSANTKFCYYNNYSLTQPRYFCKSCRRYWTKGGTLRNVPVGGGCRKNKKLSSTTSAKRSSQDNISPNISNPIPSYDSSTDLSLAFARLQKQTNAHLEIDQEHDNNNMSMMYNTGNNCTSTTFLDALRGGFLENAPNHPGLFHHNMYNYANMGQLVENGEMGMSYDQDQMSIGTSTTMMTTIVKQEMCNMARSTEGHDLNNSNNNNKVLCGFPWQQMNGDHHVNNMNTNDFEYSTNKQSWNGFGGSSNWHGLINSPLM

SEQ ID NO: 1838 - protein, 313 aa, Glycine max
MGVNEDFNKDIDDHHHEYVDDDDVPLPGFRFHPTDEELVSFYLRRKLHKKPISIELIKQIDIYKYDPWDLPKTSATAEEKEGYFFCRRGRKYRNSIRPNRVTGSGFWKATGIDKPVYSHGGEGNDCIGLKKTLVYYRGSAGKGIKTDWMMHEFRLPSNKDNTTNLPSSKNYVDVPQEAEIWTLCRIFKRNVSQRKHTPDLKQLSAKRHSIHDKNSRMSNVEFNNTNQESYINFGGHYQNEQKPVINYTNSDQRNQYHVMTHQLFAAPVAQHHQQPQQLTSPSSNFWLNSPPGNDFFTFDNWDELGSVVKFVVD

SEQ ID NO: 1839 - protein, 349 aa, Solanum tuberosum
MGVQEKYPLLQLSLPPGFRFYPTDEELLVQYLCKKVAGHDFPLQIIGEIDLYKFDPWVLPSKATFGEKEWYFFSPRDRKYPNGSRPNRVAGSGYWKATGTDKIITSQGRKVGIKKALVFYVGKAPKGSKTNWIMHEYRLFESSKKNNGSSKLDEWVLCRIYKKNSSGPKPLMSGLHSSNEYSHGSSTSSSSQFDDMLESLPEMDDRFSNLPRLNSLKTEKLNLERLDSANFDWAILAGLKPMPELRPANQAPGVQGQGQAQGNVNNHNNNNMNFLNDVYAHPTTNFRGNTKVESINLDEEVESGNRNRRIDQSSYFQQSLNGFSQAYTNSVDQFGIQCPNQTLNLGFRQ

SEQ ID NO: 1840 - protein, 226 aa, Arabidopsis thaliana
MSSSDSVNNGVNSRMYFRNPSFSNVILNDNWSDLPLSVDDSQDMAIYNTLRDAVSSGWTPSVPPVTSPAEENKPPATKASGSHAPRQKGMQYRGVRRRPWGKFAAEIRDPKKNGARVWLGTYETPEDAAVAYDRAAFQLRGSKAKLNFPHLIGSCKYEPVRIRPRRRSPEPSVSDQLTSEQKRESHVDDGESSLVVPELDFTVDQFYFDGSLLMDQSECSYSDNRI

SEQ ID NO: 1841 - protein, 161 aa, Arabidopsis thaliana
MADSDNDSGGHKDGGNASTREQDRFLPIANVSRIMKKALPANAKISKDAKETVQECVSEFISFITGEASDKCQREKRKTINGDDLLWAMTTLGFEDYVEPLKVYLQKYREVEGEKTTTAGRQGDKEGGGGGGGAGSGSGGAPMYGGGMVTTMGHQFSHHFS

SEQ ID NO: 1842 - protein, 141 aa, Arabidopsis thaliana
MADTPSSPAGDGGESGGSVREQDRYLPIANISRIMKKALPPNGKIGKDAKDTVQECVSEFISFITSEASDKCQKEKRKTVNGDDLLWAMATLGFEDYLEPLKIYLARYRELEGDNKGSGKSGDGSNRDAGGGVSGEEMPSW

SEQ ID NO: 1843 - protein, 174 aa, Zea mays
  misc_feature (127)..(127): Xaa can be any naturally occurring amino acid
MAEAPASPGGGGGSHESGSPRGGGGGGSVREQDRFLPIANISRIMKKAIPANGKIAKDAKETVQECVSEFISFITSEASDKCQREKRKTINGDDLLWAMATLGFEDYIEPLKVYLQKYREMEGDSKXTAKSSDGSIKKDALGHVGASSSAAQGGAYNQGMGYMQPQYHNGDISN

SEQ ID NO: 1844 - protein, 237 aa, Saururus chinensis
MGRGRVQLKRIENKINRQVTFSKRRTGLLKKAHEISVLCDAEVALIVFSTKGKLYDYSTNAGMARILERYERYCYAEREVAVTSPDSEGSWWLEYGKLKARIEAQQRIQRQLMGEDLDALTPKELQQLENQLESALKHVKSRKNQVIYDSMVELRRKEKLLRDENTMMEKKIQEKKKERVQQAQWEQQIQSQNSPSFLPTLNIGYHQGTATETGEKEEAHPGHNTVMLAWLLRSSNN

SEQ ID NO: 1845 - protein, 301 aa, Asarum caudigerum
AGLSSPPRERKRVRENLIFSLAFKFARFQNFRFSFSFAGGFIFFEFSSLFFFGLQEMGRGRVQLKRIENKINRQVTFSKRRTGLLKKAHEISVLCDADVALIVFSAKGKLYEYATNSSMETILERYERYSFAERELVADPESEGGWCLEYGKLKARVDALQKSHKHIMGEDLDSLSIKELQHLEQQLDVALKHIRSRKNQVMLDTISELQRKEKMLLEQNKALQKTMREKENAMVRQAQWEQDNQPQASRPSFMLSRPLPTLHIGSNYHQTRNTETEKQGDRPHSRSNSGIPAWMLSHMND

SEQ ID NO: 1846 - protein, 428 aa, Lemna paucicostata
MSFRSILSDVRDSIGSFSRRRGAEVRISGVSDNHRGRNRVTAGDFPGEIGGEIPAIYQSRWAGLPPELLRDVIKRLEESESSWPARKHVVACAAVCTAWREMCKEIVSGPEFCGKLTFPVSLKQPGPREGTIQCFIKRDKSKSRYHLFLGLSPTLPAENGKFLLSQSASRALPARNTSSPWNADDISRSSSTYIGKLRSNFLGTKFIMFDTQPPTRHCRPAPSSGRVSRRFYSKVSPKVPSGNYAIAQVTYELNVLGKRGPRRMHCTMNSIPSSALDAGGRVPAAPERILSRSLEDSFRSVSLSKDLGSSRFSEFGGEMEREEEEEGDRKKSGPLVLKNKAPRWHEQLQCWCLNFRGRVTVASVKNFQLIADGQATAAQAGASEHDKIILQFGKVGKDTFTMDNRYPLSAFQAFAICLSSFDTKLACE

SEQ ID NO: 1847 - protein, 132 aa, Brassica napus
  misc_feature (118)..(118): Xaa can be any naturally occurring amino acid
  misc_feature (129)..(129): Xaa can be any naturally occurring amino acid
MGRSPCCDKMGLKKGPWTSEEDQKLLAYIDEHGHGSWRSLPEKAGLHRCGKSCRLRWTNYLRPDIKRGKFNLQEEQTIIQLHALLGNRWSAIATHLPKRTDNEIKNYWNTHLKKRLVXMGIDPVTHKPXNET

SEQ ID NO: 1848 - protein, 189 aa, Arabidopsis thaliana
MVHSKKFRGVRQRQWGSWVSEIRHPLLKRRVWLGTFDTAETAARAYDQAAVLMNGQSAKTNFPVIKSNGSNSLEINSALRSPKSLSELLNAKLRKNCKDQTPYLTCLRLDNDSSHIGVWQKRAGSKTSPNWVKLVELGDKVNARPGGDIETNKMKVRNEDVQEDDQMAMQMIEELLNWTCPGSGSIAQV

SEQ ID NO: 1849 - protein, 313 aa, Arabidopsis thaliana
MMVDENVETKASTLVASVDHGFGSGSGHDHHGLSASVPLLGVNWKKRRMPRQRRSSSSFNLLSFPPPMPPISHVPTPLPARKIDPRKLRFLFQKELKNSDVSSLRRMILPKKAAEAHLPALECKEGIPIRMEDLDGFHVWTFKYRYWPNNNSRMYVLENTGDFVNAHGLQLGDFIMVYQDLYSNNYVIQARKASEEEEVDVINLEEDDVYTNLTRIENTVVNDLLLQDFNHHNNNNNNNSNSNSNKCSYYYPVIDDVTTNTESFVYDTTALTSNDTPLDFLGGHTTTTNNYYSKFGTFDGLGSVENISLDDFY

SEQ ID NO: 1850 - protein, 543 aa, Populus suaveolens
MLCRLNSHNIWVDYHAEEQDSTSDRPHHNNITNTAAGCGGVMLGGKQEMGSLSTFKSMFEVDHEWYVTNAYSAIPRGDQDSIKDLTFSPRLVHPYNLLLLPGHSSSSCSPSSSVVNNLDASLLHSFMPPTPTLSSLLHVVSSNPSKDGFDLSEIGFLENQGTNSTTTANVSSPLNRPRGVLGNFGNFTDLSSTVRFSFLFGFSSPDYKYPHASPAELPPALSCFTRLDEISVNPLFSSRTKLLSPLETYPIHGRSATLFQREQLEERTWGSERDKGKRDMTQIREENDKQRNSSSGDDFLEELAQMGRVRIMHLGIKEYTLVEETGKNVGNSSKVNSGVTGRGEDQKGKKRGLPAKNLMAQWRRRMQLNDRLYTMRSVVPQISKMDRPSILGDAIEYLKELLQRINDLHNELESTPPSSSLTPTTSFHPLTPTPSAEPSRIMDQLCPSSLPSPNGQPARVEVRVREARAVNIHMFCGRKTGLLLFTMRALDNLGLDIQQAVISCFNGFPMDILRNEQRKEGQDMHPDQIKAVLLDSAGFHGTM

SEQ ID NO: 1851 - protein, 329 aa, Triticum aestivum
NKFVQKSRLVPVRNSRDIVDPRVRVAVLSENGKFLLAAKRNRRTTYTEYVISVDSKNISRSSNGYVGKMRSNFLAKKFIVYDTQPPYNAGSLVPCQRGSRRISSRRVSPKVPTGSYPIAQVNDELNVLGTRGPRRMQCTMHSIPASAVDPDGVVPGQPQQLLPGPFDESFRSTNASSRFSMADFSSSRFSSSRFSDVSGGLRREEEDGEAKERPLVLRNKVPRWHEQLQCWCLNFRGRVTVASVKNFQLTAAAPQVAAVPPSEPSQPPQQQQLQPSSSLSSSTSDHEKVILQFGKVTKDMFTMDYRYPLSAFQAFAICLTSFDTKLACE

SEQ ID NO: 1852 - protein, 297 aa, Zea mays
MDDGDLDFSNPDTYLCPALGTDPPSSCSMDSYFDEILKDTEHHACTHTHTCNPPVHDLSHTHTCVHVHTKIVAASPGDDTAQVTSSCDFRCNDQMYCSPGIADSPSENNTNGSGGNGSNAASKKRPSGNRAAVRKYREKKKAHTASLEEEVVHLRALNQQLVKKLQSHAALEAEVARLRCLLVDIRGRIEGEIGAFPYQRPPPAAKNVDLVSGVDQGGFLAGAAAQVTSSCDFRCNDQMYCSPGMQGAVSGQVLGQGACDVSSIQCVGSTRSASTKLPVCGGMDAVPAACLPNVQNK

SEQ ID NO: 1853 - protein, 587 aa, Arabidopsis thaliana
MKRDHHQFQGRLSNHGTSSSSSSISKDKMMMVKKEEDGGGNMDDELLAVLGYKVRSSEMAEVALKLEQLETMMSNVQEDGLSHLATDTVHYNPSELYSWLDNMLSELNPPPLPASSNGLDPVLPSPEICGFPASDYDLKVIPGNAIYQFPAIDSSSSSNNQNKRLKSCSSPDSMVTSTSTGTQIGGVIGTTVTTTTTTTTAAGESTRSVILVDSQENGVRLVHALMACAEAIQQNNLTLAEALVKQIGCLAVSQAGAMRKVATYFAEALARRIYRLSPPQNQIDHCLSDTLQMHFYETCPYLKFAHFTANQAILEAFEGKKRVHVIDFSMNQGLQWPALMQALALREGGPPTFRLTGIGPPAPDNSDHLHEVGCKLAQLAEAIHVEFEYRGFVANSLADLDASMLELRPSDTEAVAVNSVFELHKLLGRPGGIEKVLGVVKQIKPVIFTVVEQESNHNGPVFLDRFTESLHYYSTLFDSLEGVPNSQDKVMSEVYLGKQICNLVACEGPDRVERHETLSQWGNRFGSSGLAPAHLGSNAFKQASMLLSVFNSGQGYRVEESNGCLMLGWHTRPLITTSAWKLSTAAY

SEQ ID NO: 1854 - protein, 185 aa, Zea mays
MAEAPASPGGGGGSHESGSPRGGGGGGSVREQDRFLPIANISRIMKKAIPANGKTIPANGKIAKDAKETVQECVSEFISFITSEASDKCQREKRKTINGDDLLWAMATLGFEDYIEPLKVYLQKYREMEGDSKLTAKSSDGSIKKDALGHVGASSSAAQGMGQQGAYNQGMGYMQPQYHNGDISN

SEQ ID NO: 1855 - protein, 381 aa, Glycine max
MGDMYHFDKNLSSQDEISLFLRQILLRSSLPSHSMPAGSCTSNAAQQNVNAHHPSFTASQLQDGKILAVDSTASFVSGSAACSSFKGHGASAANVSSSSAGVSENENDDYDCESEEGVEAPAEEVPTKAASSRSSSKRSRAAEVHNLSEKRRRGRINEKMKALQNLIPNSNKTDKASMLDEAIEYLKQLQLQVQMLSMRNGLSLHPMCFPEGLQPLQLSQMGMELSERNRFTSLNMSATLPLHQDNNPLHYASNLPNKHNLPNQPSVPYPPYIDNPETSFGLEPRIQTDMKPLQHKGGSSEPIRGEDILQHQQSSGIHSDANTLGGSQVVKEFESGTRLSFPFDTQACEPKDNSNSSQPCIGGRDHSGVIIRNSETNIVGR

SEQ ID NO: 1856 - protein, 243 aa, Malus x domestica
MGRGRVELKRIENKINRQVTFSKRRNGLLKKAYELSVLCDAEVGLIIFSSRGKLYEFASAGMSKTLERYQRCSFTPPENSIERETQSWYQEVTKLKAKYESLQRTQRHLLGEDLGPLSVKELQNLEKQLEGALAQTRQRKTQLMIEQMEDLRKKERHLGDLNKQLRVKLEAEGQNLNVIQNMWSSDAAAGSSNFSLHSSQTNPMDCTPEPVIQMGYHQYHPAEGSSIPRSLTGETNFIQGWVL

SEQ ID NO: 1857 - protein, 392 aa, Zea mays
EAGIRLVHALLACAEAVQQENFSAAEALVKQIPMLASSQGGAMRKVAAYFGEALARRVYRFRPPPDSSLLDAAFADLLHAHFYESCPYLKFAHFTANQAILEAFAGCRRVHVVDFGIKQGMQWPALLQALALRPGGPPSFRLTGVGPPQPDETDALQQVGWKLAQFAHTIRVDFQYRGLVAATLADLEPFMLQPEGDGDTDDEPEVIAVNSVCELHRLLAQPGTLDKVLGTVRAVRPRIVTVVEQEANHNSGTFLDRFTESLHYYSTMFDSLEGAGSGSGQPTDASSPAAAGGTDQVMSEVYLGRQICNIVACEGAERTERHETLVQWRGRLGGSGFEPVHLGSNAYKQASTLLALFAGGDGYRVEEKDGCLTLGWHTRPLIATSAWRVAAP

SEQ ID NO: 1858 - protein, 390 aa, Oryza sativa
MPSYAHHHSSLDGKMDALKSSCRSEEAADEGAAAAPSAWGMVERDGFSVEDLLDLEEFCEAEKDAAEENEQALALVAAPEEEKSKDDSQPSSVVTYELVAPPPPPPEIVDLPAHDVEELEWVSRIMDDSLSELPPPPQPPASVVASLAARPPQPRQLQRRPQDGAYRALPPASYPVRTPTICALSTEALVPVKAKRSKRSRATAWSLSGAPPFSDSTSSSSTTTTSSCSSSASFSSFSPLLKFEWHPLGGTSDLPDDHLLPPGKKSKHGKNGKNKPKKRGRKPKQLPPHPSGAAASAPAPGDRRCSHCGVQKTPQWRAGPEGAKTLCNACGVRYKSGRLLPEYRPACSPTFVSAIHSNSHRKVLEMRRKKEVGSGLLTAAAAAAPAVASF

SEQ ID NO: 1859 - protein, 225 aa, Arabidopsis thaliana
MDRGECLMSMKLRPMVTRPSSDGTLFWPFREERAFASAEEYGGGGGCMWPPRSYSCSFCGREFKSAQALGGHMNVHRRDRARLKQQSLSPSSTDQATPPECDRQQQVLDVGSKVLVQEETRKPNGTKREISDVCNNNVLESSMKRYEHDNGEVKTDLSVGLLSTEFDPRKKQLINGSSSSWKRAKTDVSRFPMMLGLVIGISEINGHHEELDLELRLGADPPKVN

SEQ ID NO: 1860 - protein, 368 aa, Gerbera hybrid cv. 'Terra Regina'
MGRAPCCEKVGLKRGRWTAEEDDILTNYIKTHGEGSWRSLPKNAGLLRCGKSCRLRWINYLRSDIKRGNISKEDEDVITKLHASLGNRWSLIAAHLPGRTDNEIKNYWNSHLSRKIIPSRRLLNTPATPVPAKLSSHPLNKRKGRTSRSAMKINKTHKSSSRDIGANNREVDGAIDTTPLAPSIEKESNVYMEPCAASHEYSDDGQKRERHDNEAEVVDDVGMFCFNEIMDGGALTDPHGVLSLAEKETEKDLALMNVVTSEEERQNVSEPISIIGGEEVNKTGSCATSTSTDSCNVGDHDNILSGPWDWKWNFDVEEGMLGLGVEDEDNILSWPWESTTTTDSGNGDTDFVGEDLEKQNAMVAWLLS

SEQ ID NO: 1861 - protein, 134 aa, Betula pendula
MEASRAEGKRSFMEEEEDQEEEEEEEEKREMSTSSSRRASGSGGSTPPTCQVENCNADLTDAKHYHRRHKVCESHAKAPIVYVAGGQKRFCQQCSRFHDLSEFDEYKKSCRKRLAGHNERRRKSSSDFHREGSN

SEQ ID NO: 1862 - protein, 208 aa, Boechera stricta
MATIEESSDLEAIQKHLFEDLMVSDGFMGDFDFDASFVSELWCIEPQVPKQEPDSPVFDPDSFVNEFLQVEAKSSPELNSSSSTYETDLSVKKAERFEEEEEEEEEEARHYRGVRRRPWGKFAAEIRDPAKKGSRIWLGTFESDVDAARAYDCAAFKLRGRKAVLNFPLEAGKYEAPANSGRKRKRSDVKEELQRTQSNSSSSSCDAF

SEQ ID NO: 1863 - protein, 234 aa, Pisum sativum
MPSSDSGESRRSIKPQNRPGAPAPEQENLPCPRCDSTNTKFCYYNNYNYSQPRHLCKACRRYWTHGGTLRDIPVGGGTRKNAKRSRTHHVAVTSSSSSSAVTSAPEQNYPSMTPIQGGSFPYGGVDGEGKQNMSVCGSFTSLLNNNPQQNSGFLALGGFGLGLGHGLGDMGFGIGREWSFPGMMDGSNMGVPVVSSGIGNSWQLEGGETGFVGGGGDCFSWPGLAISTPGNGLK

SEQ ID NO: 1864 - protein, 266 aa, Gerbera hybrid cv. 'Terra Regina'
MGRTPCCSKVGLHRGAWAIEEDKLLTDYIQTHGEGQWRALPSNAGLLRCGKSCRLRWMNYLRPGIKRGTFTSDENDVIIRLQSLHGNRWSLIAAELPGRTDNEIKNHWNSHLRRKSAENADTHHGKVSKNNKKAKKKRKSDDRRAETTTPEKSKKVKLPDSSVSSSSSCVSLSKNDSSDNGIMSSTGASSSCTIDLEDADFDFSWSDWTPLLEVEGTTSINGEQDKGFLMDGCDLLMSKEDESLRLEKLYYEYLDLLDHEDGDGNN

SEQ ID NO: 1865 - protein, 188 aa, Glycine max
MRSSNGTSSSRASNGNTGRHPVYRGVRRRSSGKWVSEIREPKKPNRIWLGTFATPEMAAIAYDVAALALKGKDAELNFPNSASSLPIPASSAAHDIQMAAALAATAVGAANDALEGSQGGNVSVSLAEEFSGGNLNHFVDEDLIFDMPNILVNMAEGMLLSPPRFDNFAATDYEYMDEDPTLWGFPNY

SEQ ID NO: 1866 - protein, 241 aa, Asparagus officinalis
MGRGRVELKRIENKINRQVTFSKRRNGLLKKAYELSVLCDAEVALIIFSSRGKLYEFGSAGTSKTLERYQRCCYTSQDAAIASHETQSWYQEVSKLKAKFESLQRSQRHLLGEDLGPLSVKELQQLERQLESALSQARQRKTQIMLDQMEELRKKERHLGEINKQLKAKLEAEGASFRAIQGSWESEAGVGGNAFSMHPSQSSAMDCEPTLQIGYHHLVQPEAALPRSSGGENNFMLGWVL

SEQ ID NO: 1867 - protein, 319 aa, Brassica napus
  misc_feature (167)..(167): Xaa can be any naturally occurring amino acid
  misc_feature (237)..(237): Xaa can be any naturally occurring amino acid
MCGGAIISDFIPPPRSRRVTSEFLWPDLKKSSKKRSSFFDLDDEFEADFQGFKDDSSIDCDDAKPFVFAGARKPAVSAATADSVFGKKVVDGEGERSAKRKRKSQYRGIRQRPWGKWAAEIRDPREGSRVWLGTFKTAEEAARAYDAAARRIRGSKAKVDFPLRRKXNPPAKKVAPNPSPVLAQNLDNSFDNMCFMEEKHQVNNNNNQFGGNGYHQYFSSDQGSNSFGCSEFGWNDXQAPITPEISSAFINNNSVTFAEEADPAKQLKVMDFETTYNSTEWDSSLDFFSGDAVATQDNGANPMELWSIDEINSMIGGVF

SEQ ID NO: 1868 - protein, 303 aa, Oryza sativa
MLLNPASREVAALDSIRHHLLEEEEETPATAPAPTRRPVYCRSSSFGSLVADQWSESLPFRPNDAEDMVVYGALRDAFSSGWLPDGSFAAVKPESQDSYDGSSIGSFLASSSSEAGTPGEVTSTEATVTPGIREGEGEAVAVASRGKHYRGVRQRPWGKFAAEIRDPAKNGARVWLGTFDSAEEAAVAYDRAAYRMRGSRALLNFPLRIGSEIAAAAAAAAAGNKRPYPDPASSGSSSPSSSSSSSSSSSSGSPKRRKRGEAAPASMAMALVPPPPPPAQAPVQLALPAQPWFAAGPIQQLVS

SEQ ID NO: 1869 - protein, 404 aa, Zea mays
  misc_feature (382)..(382): Xaa can be any naturally occurring amino acid
MGRHSCCYKQKLRKGLWSPEEDEKLMNHITKHGHGCWSSVPKLAGLQRCGKSCRLRWINYLRPDLKRGAFAQDEEDLIIELHAVLGNRWSQIAAQLPGRTDNEIKNLWNSCIKKKLRQKGIDPNTHKPLTEADRGGAAPTISTERTSGSSDVNPSSTGPLGNLSPLLSETAQSSMLMPVYDKNRAETPNLARPKLPPKELFLEQLTAGHESPSTCHSSGQTLYFPFQQPLGYNSESGSSDGANMNSLWFNQSDFNCSTISTVMPPVSPSALSTSMGLNLPPDNPRHGGTGIGSTAVDSFYWDGTNPSSSSSTGSRGSNSMGFEPQSTSTILENSVFPWTDIGQEKDTRAHLVAELKWPDSFAETTTAMQNQSQTLYDDVIKXAESQFNIEGICASWFQNQQPQQ

SEQ ID NO: 1870 - protein, 480 aa, Zea mays
MSFRSIVRDVRDGFGSLSRRSFEVTLASIYGLTGHHKGKTQSSSHVLDDSPSIIRESRWANLPPELIRDIIRRLEADESTWPARKHVVCFAAVCRTWREMCKEIVLSPEFCGKLTFPVSLKQPGPRDGNTMVQCFIKRNKSKSTYHLYLCLSNVVTSESGKFLLSAKRHRKTTCTEYTISMDSGNISRSKRTYIGKIRSNFLGTRFLIYDTQPPYNGAVVPPAGRTSRRFNSTKVSPKLPSVSYNIAQVSYELNVLGTRGPRRMRCIMHSIPASSVEPGGTVPGQPEQIVPRALEDSFRSTASFSQSFRSTASFSKSIMDSSMDFNSARFSDIAGSSARFTGVPGSSARFAGVPGSSARFSGIAGARLDNDEESETKERPLVLRNKPPRWHEQLQCWCLNFRGRVTIASVKNFQLIAAATPPPAGAPTPSQPAPSDPDKVILQFGKVARDMFTMDYRYPLSAFQAFAICLSSFDTKLACE

SEQ ID NO: 1871 - protein, 605 aa, Lycopersicon esculentum
MMMFEEMGFCGDLDFFPAPLKEVEVAAPQTEAEQVVDDDYSDEDIDVDELEKRVWRDKMKLKRLKEMNQGMEDVDSVKRRQSQEQARRKKMSRAQDGILKYMLKMMEVCKAQGFVYGIIPEKGKPVGGASDNLREWWKDKVRFDRNGPAAIAKYQAEHAIPGKNDVSNPVGPTPHTLQELQDTTLGSLLSALMQHCDPPQRRFPLEKGVSPPWWPTGQEDWWPQLGLQKDQGPPPYKKPHDLKKAWKVGVLTAVIKHISPDIAKIRKLVRQSKCLQDKMTAKESATWLAIINQEEALARELYPDRCPPLSSAGGSGTFTVNDSSEYDVDGAQDECNFDVQEQKPHHLNLLNVTVERFNERQPLQQQSHPIKDEIITSLDFTRKRKQSNEQTVTMAQIYTCEILQCPYSELRHGFQDRSARDNHQLVCPYRNTSQFGVSKFPMNEVKPVVLPQQYIPSTSVALPVNPSPPPFDLFGVGVPEDGQRMIDDLMSFYDCNIQGNKSQNTGNVAVTKEQQPHQQPRVDQVNYLHSRGMMEGNIFKDINVSASQSMQPQGNLVDQCKILNSSDNLQFMFGPPFNLQSTNYPGSLPGIGCDTTPKQDIPIWY

SEQ ID NO: 1872 - protein, 348 aa, Arabidopsis thaliana
MDRRDAMGLSGSGSYYIHRGLSGSGPPTFHGSPQQQQGLRHLPNQNSPFGSGSTGFGSPSLHGDPSLATAAGGAGALPHHIGVNMIAPPPPPSETPMKRKRGRPRKYGQDGSVSLALSSSSVSTITPNNSNKRGRGRPPGSGKKQRMASVGELMPSSSGMSFTPHVIAVSIGEDIASKVIAFSQQGPRAICVLSASGAVSTATLIQPSASPGAIKYEGRFEILALSTSYIVATDGSFRNRTGNLSVSLASPDGRVIGGAIGGPLIAASPVQVIVGSFIWAAPKIKSKKREEEASEVVQETDDHHVLDNNNNTISPVPQQQPNQNLIWSTGSRQMDMRHAHADIDLMRG

SEQ ID NO: 1873 - protein, 289 aa, Medicago truncatula
MGRKCSHCGNIGHNSRTCNSLRGSGSFVGVRLFGVQLDLSSSCVSMKKSFSMDSFPTSSSSPTSSFSSSRLTIDDRASIGYLSDGLIVRTQERKKGVPWTEEEHRKFLVGLEKLGKGDWRGISRNYVTTRTPTQVASHAQKYFIRLATLNKKKRRSSLFDMVGSGKTNKTVDPNNSSKSKSGDSVCRHDHEVEKDATLSLLINSLQQQTKSDDYDMQKIEDDSEEAEHKDVPDWLHPLTKSLNMTLVIPNSSNVAPPDLELTLAGSKSNNMEQDKTSSSSFLIGPISVT

SEQ ID NO: 1874 - protein, 179 aa, Glycine max
MARPQQRYRGVRQRHWGSWVSEIRHPLLKTRIWLGTFETAEDAARAYDEAARLMCGPKARTNFPYNPNEPLSSSSKLLSATLTAKLHKCHMASLSLQMSKQKQSQTEPHQGSSSDSGNAIAGTSSDNTGFRWPEEEAQVEVPPAQQQQFQPVLQDDHIEQMIQELLDYGSMELSFVDSA

SEQ ID NO: 1875 - protein, 623 aa, Triticum aestivum
MKREYQDAGGSGGGGGGMGSSEDKMMVSAAAGEGEEVDELLAALGYKVRASDMADVAQKLEQLEMAMGMGGVGAGAAPDDSFATHLATDTVHYNPTDLSSWVESMLSELNAPPPPLPPAPQLNASTSSTVTGSGGYFDLPPSVDSSSSIYALRPIPSPAGATAPADLSADSVRDPKRMRTGGSSTSSSSSSSSSLGGGARSSVVEAAPPVAAAANATPALPVVVVDTQEAGIRLVHALLACAEAVQQENLSAAEALVKQIPLLAASQGGAMRKVAAYFGEALARRVFRFRPQPDSSLLDAAFADLLHAHFYESCPYLKFAHFTANQAILEAFAGCRRVHVVDFGIKQGMQWPALLQALALRPGGPPSFRLTGVGPPQPDETDALQQVGWKLAQFAHTIRVDFQYRGLVAATLADLEPFMLQPEGEEDPNEEPEVIAVNSVFEMHRLLAQPGALEKVLGTVRAVRPRIVTVVEQEANHNSGTFLDRFTESLHYYSTMFDSLEGGSSGGGPSEVSSGAAAAPAAAGTDQVMSEVYLGRQICNVVACEGAERTERHETLGQWRNRLGNAGFETVHLGSNAYKQASTLLALFAGGDGYKVEEKEGCLTLGWHTRPLIATSAWRLAGP

SEQ ID NO: 1876 - protein, 189 aa, Arabidopsis thaliana
MAKEGLALEITELRLGLPGDNYSEISVCGSSKKKKRVLSDMMTSSALDTENENSVVSSVEDESLPVVKSQAVGWPPVCSYRRKKNNEEASKAIGYVKVSMDGVPYMRKIDLGSSNSYINLVTVLENLFGCLGIGVAKEGKKCEYIIIYEDKDRDWMLVGDVPWQMFKESCKRLRIVKRSDATGFGLQQD

SEQ ID NO: 1877 - protein, 841 aa, Oryza sativa
GGCCCRGGGARGGGGGGGGGGGEDALFTELWSACAGPLVTVPRVGEKVFYFPQGHIEQVEASTNQVGEQRMQLYNLPWKILCEVMNVELKAEPDTDEVYAQLTLLPELKQQEDNGSTEEEVPSAPAAGHVRPRVHSFCKTLTASDTSTHGGFSVLRRHADECLPPLDMSRQPPTQELVAKDLHGVEWRFRHIFRGQPRRHLLQSGWSVFVSAKRLVAGDAFIFLRGENGELRVGVRRAMRQQTNVPSSVISSHSMHLGVLATAWHAVNTGTMFTVYYKPRTSPAEFVVPYDRYMESLKRNYSIGMRFKMRFEGEEAPEQRFTGTIVGMGDSDPAGWPESKWRSLKVSWRKASSIPRPERVSPWQIEPAVSPPPVNPLPVPRTKRLRPNATALPADSSAIAKEAATKVVVESEPNGTQRTFQTQENATPKSGFGNSSELESAQKSIMRPSGFDREKNNTPIQWKLGSDGWMQMSKPESYSEMLSGFQPPKDVQTPQGFCSLPEQITAGHSNFWHTVNAQYQDQQSNHNMFPSSWSFMPPNTRLGLNKQNYSMIQEAGVLSQRPGNTKFGNGVYAALPGRGTEQYSGGWFGHMMPNSHMDDTQPRLIKPKPLVVAHGDVQKAKGASCKLFGIHLDSPAKSEPLKSPSSVVYDGTPQTPGATEWRRPDVTEVEKCSDPSKAMKPLDTPQPDSVPEKPSSQQASRNMSCKSQGVSTRSCKKVHKQGIALGRSVDLTKFNGYEELIAELDDMFDFNGELKGPKKEWMVVYTDNEGDMMLVGDDPWIEFCDMVHKIFIYTREEVQRMNPGTLNSRSEDSHANSMERGSVGREMRGCLSTSSLNSENC

SEQ ID NO: 1878 - protein, 200 aa, Sorghum bicolor
MGEEAMDDYELHMVCYGGDDDGRVMEWESGLPGADELTPLSQPLVPPGLAAAFRIPPEPGRTLLDVHRASAATVSRLRRAPSSSSSGSGGSGSSSFAPFHPHPQAAAAAGHARGDEDADSSAAALGGGNAATTTTNTGTNSKRPRLVWTPQLHKRFVDVVAHLGIKNAVPKTIMQLMNVEGLTRENVASHLQKYRLYVKR

SEQ ID NO: 1879 - protein, 352 aa, Glycine max
MDGREAMAFPGSSAPYYMHRVGIGGSASGFEPAPGFRPLSNTGIQAESNARGGQGQGGGSVGSSSPFSVEPPQGHTNFNHGIGIGAPSSEPVKKKRGRPRKYGPDGAVSLRLSPMSAPANSTQDASETTPSQKKARGRPPGSGRKQQLAALGEWMNSSAGLAFSPHVITIGVGEDIVAKLLSLSQQRPRALCIMSGTGTVSSVTLRQPASTNASVTFEGRFQILCLSGSYLVAEDGGPLNRTGGISVSLSSPDGHVIGGGVAVLIAGSPVQVMLCSFVYGGSKTMSKQATTLKDESSEPPPQHNDKLASPASAPAPPGQNFLPLSAANLWPGSRPAELKSAHMHTGIDLTHG

SEQ ID NO: 1880 - protein, 268 aa, Arabidopsis thaliana
MSMTADSQSDYAFLESIRRHLLGESEPILSESTASSVTQSCVTGQSIKPVYGRNPSFSKLYPCFTESWGDLPLKENDSEDMLVYGILNDAFHGGWEPSSSSSDEDRSSFPSVKIETPESFAAVDSVPVKKEKTSPVSAAVTAAKGKHYRGVRQRPWGKFAAEIRDPAKNGARVWLGTFETAEDAALAYDRAAFRMRGSRALLNFPLRVNSGEPDPVRIKSKRSSFSSSNENGAPKKRRTVAAGGGMDKGLTVKCEVVEVARGDRLLVL

SEQ ID NO: 1881 - protein, 89 aa, Triticum aestivum
MSSGSSSRSTSPSSDSEWSKKENKMFEEALAYYGVSAPNLWEKVASAMGGTKSADEVRRHFQILVDDVNSIEHGRIPFPKYKTQGFWTK

SEQ ID NO: 1882 - protein, 537 aa, Gossypium hirsutum
MKRDHQEISGSGSNPAESSSIKGKLWEEDPDAGGMDDELLAVLGYKVRSSDMADVAQKLEMLEKVMGTAQEDGISQLGDTVHFNPSDLSGWVQNLLIEFNGSTTTPDPNFNDDSEYDLRAIPGVAAYPPVKSDPGLEITRKRAKTESSSSSSSTTTRPVVLIDSQEAGVRLVHTLMACAEAVQQDNLKLADALVKHIGLLASSQTGAMRKVATYFAEALARRIYRIFPPDSLDPSYNDKLQIPFYETCPYLKFAHFTANQAILEAFSMASRVHVIDFGLKQGMQWPALMQALALRPGGPPAFRLTGIGPPQPDNTDALQQVGWKLAQLAERIGIEFEFRGFVANSLADLEPEMLDIRPPEIEVVAVNAVFELHPLLARPGGIEKVVSSIKAMKPKIVTVVEQEANHNGPVFLDRFTEALHYYSTLFDSLEGSGVAPASQDLAMSELYLGRQICNVVACEGMDRVERHEPLTQWRTRMETAGVSPVHLGSNAYKQASMLLALFASGDGYRVEENNGCLMLGWHTRPLIAHLGLATRWY

SEQ ID NO: 1883 - protein, 174 aa, Arabidopsis thaliana
MANESNNLGLEITELRLGLPGDIVVSGESISGKKRASPEVEIDLKCEPAKKSQVVGWPPVCSYRRKNSLERTKSSYVKVSVDGAAFLRKIDLEMYKCYQDLASALQILFGCYINFDDTLKESECVPIYEDKDGDWMLAGDVPWEMFLGSCKRLRIMKRSYVPGFGRTKPPIKLG

SEQ ID NO: 1884 - protein, 283 aa, Glycine max
MVEHADLKDGGGDAVSWQIGRCKTEILQHPLYEQLLSAHVACLRIATPVDQLPRIDAQLAQSQNVVAKYAVFGHNNIVADDKELDQFMSHYVLLLCSFKEQLQQHVRVHAMEAVMACWELEQSLQSLTGVSPGEGTGATMSDDENDQVDSDANLFDCSFDGADSMGFGPLVPTESERSLMERVRQELKHELKQGYKEKIVDIREEILRKRRAGKLPGDTTSVLKAWWQSHSKWPYPTEEDKARLVQETGLQLKQINNWFINQRKRNWHSNPSTSTALKSKRKR

SEQ ID NO: 1885 - protein, 110 aa, Brassica napus
AQGFVYGIIPENGKPVTGASDNLREWWKDNVRFDRNGPAAISKYQAENNIPGVRERSNHIGPTPYTWHELQDTTLRSLMSALMQHCDPSQRRFPLEKGVPTPWWTNGKED

SEQ ID NO: 1886 - protein, 390 aa, Gossypium hirsutum
MCGGAIISDFIPPSRSRRLTADFLWPDLKKSGLKKGSGKRYSKPVIDLGDDFETDFQEFKDEESDIDDYDVDDVLADVKPFAFNATKKPASAVSHGSNSEKSMQFNGQAEKCAKRKRKNQYRGIRQRPWGKWAAEIRDPRKGVRVWLGTFNTAEEAARAYDAEARRIRGKKAKVNFPNETPRTSPKHAVKTNSQKPLSKSNSSPVQPNLNQNYNYLNQPEQEYFDTMGFVEEKPSVNQFAYVDPVPTSIDAGFNQSDNAPLYFNSDQGSNSINCSDYGWGEQGAKTPEISSILEASVEGDEFLEDANPSKKLKPSSDNVMPAEDNSAKTLSDELLALDNQMKYFQMPPFIEGNWDATIDAFLNGDATQDGGNPMDLWNFDDFPTMAEGVF

SEQ ID NO: 1887 - protein, 796 aa, Triticum aestivum
MPPAAMAPPQAPSAGDPLYDELWHACAGPLVTVPRVGDLVFYFPQGHIEQVEASMNQVAGNQMRLYDLPSKLLCRVINVELKAEADTDEVYAQVMLMPEPEQNEMAVDKSTSTTGATPPRPAVRSFCKTLTASDTSTHGGFSVLRRHADECLPPLDMTQSPPTQELVAKDLHGMDWRFRHIFRGQPRRHLLQSGWSVFVSSKRLVAGDAFIFLRGESGELRVGVRRAMRQLSNVPSSVISSHSMHLGVLATAWHAINTKSMFTVYYKPRTSPSEFIIPYDQYMESVKNNYSIGMRFRMRFEGEEAPEQRFTGTIVGSENLDQLWPESNWRSLKVRWDEPSTIPRPDRVSPWKIEPASSPPVNPLPLSRVKRPRPNVPPVSPESSVLTKEVAAKIDMDSAQAQQRNQNSMVLQGQEHMTLRTNNLTGSNESDATVQKPMMWSPSPNIGKNHASAFQQRPSMDNWMQLGRCDASSGAQSFGDSQGFFMQTFDEAPNRHGSFKNQFQDHSSARHFSDPYTKMQTEANEFHFWNSQSTVYGNPRDQSQGFRFEEHPSNWLRQQQFSPVEQPRVIRPHASIAPVDLEKAREGSGFKIFGFKVDTTSTPSNHLSSSMAAIHEPVLQIQASASLTQLQHTHADCIPELSVSTAGTTENEKSIQQAPHSSKDVQSKSHGASTRSCTKVHKQGVALGRSVDLSKFGDYDELTAELDRMFEFDGELMSSNKDWQIVYTDPEGDMMLVGDDPWEEFCNIVRKIFIYTKEEVQKMNSKSSAPRKEEGSGDADGANEKAHLATSSHLDN

SEQ ID NO: 1888 - protein, 810 aa, Medicago truncatula
MEIDLNDSITEVKKNVCSNGKCEKSVCCVCTLSSSSSPTCSSSSSTSAIVSSSYLELWHACAGPLTSLPKKGNVVVYFPQGHLEQVASLSLFSSLEIPTYGLQPQILCRVVNVQLLANKENDEVYTQVALLPQAELAGMCLDDKEPEGLEADDEGNGRSPTKLASHMFCKTLTASDTSTHGGFSVPRRAAEDCFPPLDYKQQRPSQELVAKDLHGVGWKFRHIYRGQPRRHLLTTGWSIFVSQKNLVSGDAVLFLRGENGELRLGIRRAARPRNGLPESIIGNQSCSPSFLSSVANAISAKSMFHVFYSPRASHADFVVPYQKYAKSIRNPVTIGTRFKMKFEMDESPERRCSSGIVTGMSDLDPYKWPKSKWRCLMVRWDEDIGANHQDRVSPWEIDPSTSLPPLNIQSSRRLKKLRTGLHVESPSHFITAGDSGFMDFDESIRSSKVLQGQEKTSFMSLYYGCDTVTKQKEFDINSLRHTNLASNGARKITSSEFTRIQPSSYADFTEMNRFPRVLQAQEIYPLRSLTGKVDLNLNSWGKTNVSYTKYNLHNATKLNFHSLGSEVLQNSSFPYGDIHKVGQGSSMLCSKPTNFQLGNVSFNTPSSQIGALRNEVGLSSFKIRNEQKLQNDISAATSLDANIRISNDENFKEMVNPCKLFGFSLSAAAETTSQNLQNSAKRSCTKVHKQGSLVGRAIDLSRLSSYNDLVSELERLFGMEGLLRDPDKGWRILYTDSENDIMVVGDDPWHEFCDMVSKIHIYTQEEVEKMTIGMMNDDNQSCLEQTPLIMEASKSSSVGQPDSSTTVVRI

SEQ ID NO: 1889 - protein, 355 aa, Triticum aestivum
MPMGSSSAAMPALPPGFRFHPTDEELIVHYLGRQAASMPSPVPIIAEVNIYKCNPWDLPGKALFGENEWYFFSPRDRKYPNGARPNRAAGSGYWKATGTDKAILSTPANESIGVKKALVFYRGKPPKGVKTDWIMHEYRLTAADNRTTKRRGSSMRLDDWVLCRIHKKCGNLPNFSSSDQEQEHEQESSTVEDSQNNHTVSSPKSEAFDGDGNDHLQLQQFRPMAIAKSCSLTDLLNTVDYAALSHLLLDGAGASSSDAGADYQLPPENPLIYSQPPWQQTLHYNNNNGYVNNETIDVPQLPEAGVDDYGMNGDKYNGMKRKRSSGSLYCSQLQLPADQYSGMLTHPFLSQQLHM

SEQ ID NO: 1890 - protein, 359 aa, Triticum aestivum
MPMGSSSAAMPALPPGFRFHPTDEELIVHYLGRQAASMPSPVPIIAEVNIYKCNPWDLPGKALFGENEWYFFSPRDRKYPNGARPNRAAGSGYWKATGTDKAILSTPANESIGVKKALVFYRGKPPKGVKTDWIMHEYRLTAADNRTTKRRGSSMRLDDWVLCRIHKKCNNLHNFSSSDQEQEHEQESSTTVEDSHNNHTVSSPKSEAFDGDGDDQLQLQQFRPMAIAKSCSLTDLLNTVDYAALSHLLLDGAGAGASSSDAGADYQLPPENPLIYSQPPWQQTLHYNNNNNGYVNIDTIDVPQIPEARVDDYGMNGDRYNGMKRKRSSGSLYCSQLQLPADQYSGMLIHPFLSQQLHM

SEQ ID NO: 1891 - protein, 426 aa, Lycopersicon esculentum
MEFQDHFSQEMVLHQQQQQQQQQQNAVLRSMLPESPHHDARKSPPTWLNTSLLRQQHSQFGNASSPSSAAAAAAVAGGNNFLHLQTSNSDSSNSNQWLSPTAAAGGGSNGGGSGHNDELSESMNFAKKMSQQHSGGGEENNNNNNNNNNNNNEEENSWEREKCKADILNHPLYDQLLSAHVSCLRIATPVDQLPRIDAQLAQSQNVVAKYSVLGQGQPPLDDKDLDQFMTHYVLLLSSFKEQLQQHVRVHAMEAVMACWELEQSLQSLTGVAPGEGTGATMSDDDDDQADSDTNFLDGGFDGPDSMGFGPLVPTESERSLMERVRQELKHELKQGYKEKIVDIREEILRKRRAGKLPGDTTSVLKAWWQSHSKWPYPTEEDKARLVQETGLQLKQINNWFINQRKRNWHSNPSTSSSQKSQTQECR

SEQ ID NO: 1892 - protein, 596 aa, Sorghum bicolor
MAEGEERPSGGGDDENGEERPSGGGDDENGKYPIGFRFEPTTEELVEFYLLPRLLGEPTVPNEFVIEADAYGCDPEILTEKYKESGVDDTWYFLSPRYRKYRGGDRPVRRTADDRGRWKPSTGQSKPPEDEDDDDASTSRHSKAKKKQAAFSENTLAYYVGSTKDETKTKWLMHELVVPVTPDNGFHSKSKSAAAEPRNDMLVSSRRARRSNSAVFECLRWWIYKSPLRKWKEIDEAAAAAEVPTSSHSSWPAPECVIGEAAARATSSRQQPPAKRPAVGRPAAASGHTGAPNKGVSVSQSTLFPGGCSAPPTRGNGRGSSVRMPPIVVGAGAAGHHGPGLPALMHLLRPPVQVQQTPLVYGYGNRAAGMPNVNGQAAPRWQGPPPHRAAATTPNSLGPEMMTRPPNLAAGQPAWLPSPRRQQQQQQQQQQQQQQPPPETEEAYRNRVYARLIAEMKLQKKAEQDSAARAGQQQISQTASASAKPACFHDEGGDRPAGVEAMVRPAQFPAPHGGYPYGSSSSSNNLAQRPQRQQSTSSAALAPALAAVEKAPAAENVPSNQPVPPAPGANEGSCKGDAPTATIADNIILQILTTDC

SEQ ID NO: 1893 - protein, 259 aa, Triticum aestivum
MGRGRVELKRIENKINRQVTFSKRRNGLLKKAYELSVLCDAEVALIIFSSRGKLYEFGSAGTTKTLERYQHCCYNAQDSNGALSETQSWYQEMSKLKAKFEALQRTQRHLLGEDLGPLSVKELQQLEKQLECSLSLARQLKTQLMMEQVEELRRKERQLGDINRQLKHKLDAEGSNSNNYRAMQQITWAAGTVVDEGAAAYHMQQQQQQHPNHSAAMDCEPTLQIGYPHQFAAPDQAANNIPRSSAPGGENNFMLGWVL

SEQ ID NO: 1894 - protein, 154 aa, Brassica napus
MTLRSLILEMRSRSHRVVHDLASAADSTPPASSETNRWSDIPEELLREILIRVEAADGGNWPSRRSVVACAGVCRGWRLLMNETVGVPEISSKLTFPISLKQPGPRESLIQCFIKRNRATQSYHLYLGLTNSLTDEGKFLLAASKLKHTTCTDY

SEQ ID NO: 1895 - protein, 439 aa, Zea mays
  misc_feature (107)..(107): Xaa can be any naturally occurring amino acid
  misc_feature (233)..(233): Xaa can be any naturally occurring amino acid
MCGGAILSGFIPPSGVAAAAAAAKKKQQQQRCRVTADLLWPGPGSKGAPQDQEEDFEADFREFERGLGEDDVDSAGEGGDPEVQELPPPEPTRFAFATAAKAAVAFXIIDGVMTTTPKDVKGDRPVKRGRKNQYRGIRQRPWGKWAAEIRDPNKGVRVWLGTYNTAEEAARAYDAEARKIRGKKAKVNFPDDDAPGTGHRPANAAPRLVAPPPPPKACADEIFNNLRTTTTTXNNNNDDLFAMFAFGDNKKKVPAAKPAAAEGGSGSGSFLVPAPAVAVVPGNKRRSSATNTMLSVSDDQRSNSYGSGSSDLVGSWSWDDDAAAAAMTSDYTSSVFAPDNAVLPAASYSYMQGGAPKRMRSSYGGAPPSLAHDAAMPGFGLDKVSYHYQALPPYYVGSSNASVGSLGLLQADDAPQDGASAGDIWSLDELLMLAAAGAY

SEQ ID NO: 1896 - protein, 468 aa, Zea mays
MFHHQQELLQAEAAAADRESSMSNLTSSTFGGPNAAPAAAAAAPPAPAASGNNKRKRSLPGNPDPEAEVVALSPATLMATNRFVCEICGKGFQRDQNLQLHRRGHNLPWKLKQRGTGKEAQRRKVYVCPEASCVHHDPARALGDLTGIKKHFFRKHGEKKWKCDKCSKKYAVHSDWKAHSKICGTREYKCDCGTIFSRRDSFITHRAFCDALTEESAKAIGLNAMAAVPAQHHHHPMLFSPPPTHVMQQDVALLQEHHHQEVMQQEHCNYAMKTEMPPWPGMTYDHPLLQPLCNAAAPQSSATSTPPPPTTMQLPAAYAHLSATALLQKAAQMGATVAGAGYTQMAGAATSATFGLGLPDLQNTQQQQHQDGEIMAGLARTASHGRGGEEGGGGGGDGMTRDFLGLRAFSHRDILGLAGLDSSCMGAIISASASMNCYDEPQQRAQAQAEQQQQSSNEQWHSMGSHQS

SEQ ID NO: 1897 - protein, 203 aa, Nicotiana tabacum
HEETWGELPLKVDDSEDMVIYTLLKDALNVGWSPFNFTAGEVKSELMEEEIVVSPADTTAAPAAELPRGRHYRGVRRRPWGEFAAEIRDPAKNGARVWHRTYETDEEAAIAYDKAAYRMRGSKAHLNFPHRIGLNEPEPVRVTAKRRASPEPASSSENSSAKRRRKAVAAEKSGAVEVESKSNVLQVGCQVELLTRGHQLLVS

SEQ ID NO: 1898 - protein, 324 aa, Arabidopsis thaliana
  misc_feature (279)..(279): Xaa can be any naturally occurring amino acid
MNIVSWKDANDEVAGGATTRREREVKEDQEETEVRATSGKTVIKKQPTSISSSSSSWMKSKDPRIVRVSRAFGGKDRHSKVCTLRGLRDRRVRLSVPTAIQLYDLQERLGVDQPSKAVDWLLDAAKEEIDELPPLPISPENFSIFNHHQSFLNLGQRPGQDPTQLGFKINGCVQKSTTTSREENDREKGENDVVYTNNHHVGSYGTYHNLEHHHHHHQHLSLQADYHSHQLHSLVPFPSQILVCPMTTSPTTTTIQSLFPSSSSAGSGTMETLDPRQMXNNGGRDIDNRMSSVQFNRTNSTTTANMSRHLGSERCTSRGSDHHM

SEQ ID NO: 1899 - protein, 190 aa, Medicago truncatula
MAGIREQDQYMPIANVIRIMRRILPSHAKISDDAKETIQECVSEYISFITSEANDRCQREQRKTVTAEDILWAMGKLGFDDYVHPLTFYLQRYRESEGEPASVRRTSSLALPPSFPLMQQHSSSFSSMPLPLINNNNHNSNGYGHGYGFDFDQGFYRDGGDDAAPSSASFVPNFDCNFLHLKRDNHNNNM

SEQ ID NO: 1900 - protein, 125 aa, Zea mays
QPKKKPASKKRRVVAPAPELAAAADPGKTAPTTTTTTTTTSEITTETGALEDSDSLAHLLLQPGTEDAEAVALGLGLSDFPSAGKAVLDDEDSFVWPAASFDMGACWAGAGFADPDPACIFLNLP

SEQ ID NO: 1901 - protein, 195 aa, Glycine max
MARPQQRYRGVRQRHWGSWVSEICHPLLKTRIWLGTFETAEDAARAYDEAARLMCGSKARTNFPYNPNEPHSSSSKLLSATLTAKLHKCHMASLSLQMAKQKPPQSKEPQPSHGSSNPFAFANVIAGSSADTGFRWPDNRHEEFRWLEGNWVGVEGQVEVSHQQFQPVLEDDHIEQMIQELLDYGSIELCSVGLT

SEQ ID NO: 1902 - protein, 252 aa, Brassica juncea
MAYQTELGGESSSQRKAGRGKIEIKRIENTTNRQVTFCKRRNGLLKKAYELSVLCYAEVALIVFSSRGRLYEYSNNSVKGTIERYKKAISDNSNTGSVAEINAQYYQQESAKLRQQIISIQNSNRQLMGETIGSMSPKELRNLEGRLDRSVNRIRSKKNELLFAEIDYMQKREVDLHNDNQLLRAKIAENERNNPSMSLMPGGSNYEQIMPPPQTQPQPFDSRNYFQVAALQPNNHHYSSAGREDQTALQLV

SEQ ID NO: 1903 - protein, 194 aa, Brassica napus
  misc_feature (142)..(142): Xaa can be any naturally occurring amino acid
NISGVRQRHWGSGVADIRRPHWKRRIWLGTFETAEEAARAYDEAAVLMSGRNAKTNFSLNNNNNTGDTSEGKTDISSSSSSSSSLSTILSAKLRKCCKSPSPSLTCLRLDTGSSHIRSLAEIVPGCRSASSRVLTGELRPAXSQEPTSTTASKDDVVGPATEVGGGGEEGLMDEEEKVALQMIEELLIYSYFYC

SEQ ID NO: 1904 - protein, 189 aa, Brassica napus
VNKDGTVRHFFHRPSKAYTTGTRKRRKVHTDSEVDGETRWHKTGKTRPVLTGGRVRGYKKILVLYTNYGKQKKPEKTNWVMHQYHLGTNEEEKEGELVVSKVFYQTQPRQCGGSVAAAATAKERPYLHGDSHHLGGGGGRHLHYHLHNVKGSGGSAVAGEYYNNIPAIISFNQTGIQNHLVNGSQPFIP

SEQ ID NO: 1905 - protein, 283 aa, Zea mays
SVRISLPVASASETLDSPRELLRFSCPRWSRSPAVAAELWCSPHLAAGGGRPLEATSAVTEKSSGGRGGGGAVRRRPRETPVSEDDSSRIVSTSGGGGGQDLTDLEAKRSKTNKSSNNKGSLRTEVETDSRSAGKAVSKNIPAAEPPKQDYIHVRARRGQATDSHSLAERARREKISERMKVLQDLVPGCNKVIGKASVLDEIINYIQSLQCQVEFLSMKLEAVNAQANQGVEVFPAKDYGSQTYNTAPGLTFDTQTSREYAQGTSTSEWLHMQIGSGYERVS

SEQ ID NO: 1906 - protein, 77 aa, Glycine max
MEDGRALRRMSIPTRRSRSADFHNFSERRRRDKINEKLKALQELLPNCTKTDKVSMLDEAIDYLKSLQLQLQMLVMG

SEQ ID NO: 1907 - protein, 224 aa, Glycine max
MEKVNFVKNGELRLPPGFRFHPTDEELVLQYLKRKVFSCPLPASIIPELHVCKSDPWDLPGDLEQERYFFSTKVAKYPNGNRSNRATNSGYWKATGLDKQIVTSKGNNQVVGMKKTLVFYRGKPPNGSRTDWIMHEYRLILNASQSQSHVVPMENWVLCRIFLKRRIGAKNGEESNSKVVFYDFLAQNKTDSSSSVASGITHESDEHEESSSSNTFPYTIRRKP

SEQ ID NO: 1908 - protein, 541 aa, Triticum aestivum
  misc_feature (488)..(488): Xaa can be any naturally occurring amino acid
QVCTKKQAGTGPEFPGYRRPTRPRAQDGILKYMLKMMEVCRAQGFVYGIIPEKGKPVSGASDNLRAWWKEKVRFDRNGPAAIAKYQADNAMPGSESELASGTTSPHSLQELQDTTLGSLLSALMQHCDPPQRRFPLEKGISPPWWPSGDEEWWPELGIPKDQGPPPYKKPHDLKKAWKVSVLTAVIKHMSPDIEKIRRLVRQSKCLQDKMTAKEISTWLAVVKQEEELFMRLHPGARPPASAGGIASAISFNASSSEYDVDVADDCKGDEAGTHKMAMADPTAFNLGAAILNDKFLMQAPMKEETADMEYVQKRSAVAAEPELMLNNRVYTCNNVQCPHSDYGYGFLDRNARTNHQYTCKYNDPLPPSAENKAAPPAPPQVFPAAYNQPNHGLNNLDFGLPMDGQRSIAELMNMYDTAFPANNKNMGNDDVTIIERPNAITPVTQMDEGFFGQGNGIGGNGDSMFSDVSNMMQQQQQQPQQPQQQQQXAPAQQQFFIRDDAQFGNQMGSISGASDFRFGSGFNMSGTVDYPQKNDGPNWYY

SEQ ID NO: 1909 - protein, 642 aa, Zea mays
MMGGGLLVDQSVVFPGVHNFVDLLQQNGDKNLGFGSLMPQTSSGDQCVMGEGDLVDPPPDSFPDAGEDDSDDDVEDIEELERRMWRDRMKLKRLRELQQTRGKDSLASGAGLADGSSKPRQSQEQARRKKMSRAQDGILKYMLKMMEVCRAQGFVYGIIPEKGKPVSGASDNLRAWWKEKVRFDRNGPAAIAKYQADNAVPGAENELASGAASPHSLQELQDTTLGSLLSALMQHCEPPQRRYPLEKGVPPPWWPTGDEEWWPELGIPKDQGPPPYKKPHDLKKAWKVSVLTAVIKHMSPDIEKIRRLVRQSKCLQDKMTAKEISTWLAVVKQEEELYQKLNPGARPPASTGGIASAISFNTSSSEYDVDIIDECKGDEAGNQRTAVTDPTAFNLGAAILSDKFLVPTPMKEETADVEFIQKRNAPAAAEPELMLNNRLYTCNNVQCPRSDYSYGFLDRNARNSHQYTCKHKDPTPQSTENKPPSAPPQPQAFQPAFSQPNQALNSLDFSLPMDGQRSIAELMNMYDNNFVPNKNPSSDSVAVMERPNAMPQQRIQMDEGFFVQGNGAFDDVNNSMMQQQQQQAPVQQQQQFFIRDDTPFVSQMGDIAASAPEFRFGPGFNMSSGVDYPGAAQRNDGTNWFY

SEQ ID NO: 1910 - protein, 1425 aa, Chlamydomonas reinhardtii
MPATSRRFGVLLYLLASYLICTSNLGDPELTAQFHAQVRAVSPSGSHRPAESIATDLVRAPTLLVQADPNAYTWPMVAFGTAFGLNFITLLFERESAKFQLALLACYINFLAGFSDYMSWKGYAPIVRDSWGQGFQLLRTVMWLLTTPAMVYLLSIISDFSRLKVYSVMLADVLMITFGILAFLAYNKVMSILFYMVAWCLFAYVVHSMWSMFHASIAEARHDSSRVSLEVLRLFAVGLWFTFPVIWIVVKMGLVDIRTEEWTWCACDFLGKVMFSSSLLHGNFLTIEQRRLIAMRIVEEGNRIQVIQELKDLVEQKERFMSSMSHELRTPLNGIIGLSDALLVGSCGEINDQALKTITTIKTSGARLLNLINDILDAASMRKGKLTIKHEKVNLKRVVDDVIDLCQPLAKRGVKLVNDLRENVPFVLGDTGRIIQVFHNLIGNSCKFTHSGNISISAAVKDDEVEVAVADTGIGIPEDKFDQIFLAFEQVDMSVTRKYGGTGLGLNLVKQLVEAHGGRISVKSRENQGTTFYFTLKIHSEHPNEGQPQMTPTESVAAIPPPEHSQLATVRGTAPSAGGLPPSSSGATAGPRRAPSRRGSFTDKMLGALGAGMGGHHKKPPSETESRDGPYASNAGPGGGGNAGQGSAMVRRVSRDAHGSNPPNPKSVTAGPQVSGPMSLSDAAALMKGALKRKSSFRERGAKVRVLSVDDDPVNQLVIQNLLAPVGYEILQAMDGQEALKVLTEEERLPDVILLDVMMPGMSGYEVCRKLREMYPLSCIPVIMISAKSKEEHIVEGLAAGSNDYVVKPFGRQEILARIAAHLRFRDTVYQAGEIAGAIPGDVRPERVLLRGGANGGGLDLTPFLTGPARFTSLPPRIARGIEAGTTSTTLQMFESLTLLEVRLVNLGDLLASVPASDLLVALASLFHDLDTLLEQHGCYLLEGLDESHLIVSGLDNVGDQVLHALGLARSLIAAADTFALGGRRSKLHLAVGVHTGPAQGVLVGYSHPLIFFTGQLPAEVHMLQATCPPNCVHVSARVLESVAHSEREHFVPAGVMASGATTYLMKVGGWEGGGIVAASEATSRWSKAKRGMHDGLATDARRMRPIQLALLDMAQANPAFLVDIASAAHGAAGGGAGTSSDGQGERGGGGGGSEELSKLKREYESLERQMEEVSGEAARLQDLVDELEEQLLARSNTAAASTAATAAASQQAAVAAADAASLKAHVAELEGQLAEAARERNGLEAALAEMEQRLVATHAALATANHEAADRARAHTPAPQELPPHHPHSASRSHLHVLPQQNTPRVETASMAPSASGSEANFASGLSALGGGSLFGGGALMPRGAMPLGVPMRMPNLAALRAHAGDMRGLLDELGLGSLASRFEAEDVSPGLLPYLDDAAMRELGASSVGARLKLRLAAQALFM

SEQ ID NO: 1911 - protein, 267 aa, Alpinia hainanensis
MEHKADQDRLLGFKGGKLEPPVAAVGRMGRGKIEIKRIENTTSRQVTFCKRRNGLLKKAYELSLLCDAEVALVVFSCRGRLYEYASSSVKSTIEKYKKACKDTTNDGFVSEANAQYYQQEASKLRQQINSIQISNRNLMGESLHSMNLRDLKQLESRLEKGIGKIRNKKNELLFAEIEYMQRREMELQSDNIFLRNKIAETDRVHQQMSMLPSTGATVAYEAMPTYYSGNFMQCKNRSQTNIYPQQRQRTFTSTPMRSKHGAWVLRG

SEQ ID NO: 1912 - protein, 248 aa, Cleome spinosa
MGRGRVELKRIENKINRQVTFAKRRNGLLKKAYELSVLCDAEVALIIFSNRGKLYEFCSSPNMLKTLERYQKCSYGSIEVNNKPAKELENSYREYLKLKSRFEGLQRQQRNLLGEDLGPLNSKELEQIERQLDGSLKQVRSIKTQYMIDQLSELQSREQMLLEANRALSMKLDEMVGARTHHIGGGWEGSEQNVTYGHQPQPQGLFQPLECNPTLQIGYNNPECPEQMTATTQAPAQAGNGYIPGWML

SEQ ID NO: 1913 - protein, 244 aa, Crocus sativus
MGRGRVELKRIENTINRQVTFSKRRGGLLKKANEISVLCDADVAIIIFSTKGKLSEYSTDARMESILERYDRYSCAERDIVAPDPDSQESWRDEYGRLKAKLEALQTSQRHLMGAQLDMLSAKELQQLEQQLENALKNIRSRKNQLLFDSISELLKKEKTLTTQNKDMEMKLIEKKKVKSMARQGQQYTESSSPPSLLIQDPFPSLTIGINPASGSSEEDNEARLLPPVNRNRLPPWMVRSANE

SEQ ID NO: 1914 - protein, 260 aa, Triticum aestivum
YIGKLRSNFLGTKFLIYDTQPPYNGAVVPPVGRSSRRFNSTRVSPKVPAGSYNIAQVTYELNVLGTRGPRRMRCIMHSIPASSVEPGGVVPGQPEQIVPRALGDSFRSITSFSQSFRSSATFSRSIMDQSMDFNSARFSEISGCGGVTDGDGEGEVKERPLVLRNKPPRWHEQLQCWCLNFRGRVTIASVKNFQLTAASNPPPAGAPTPSQPGPVDPEKVILQFGKVARDMFTMDYRYPLSAFQAFAICLSSFDTKLACE

SEQ ID NO: 1915 - protein, 387 aa, Oryza sativa (japonica cultivar-group)
MSSFAHHHHGSLVEKDGRMSALRSSLRPYEAAEEMAAAAAAGGPAAAWGAVERGAGMMGDGFSVEDLLDLEELCEVDRDGGEQGEAAAAAAAAVEKERSSDSHGSSVVSYEPMPLLPPVMDLPAHDVEELEWVSRIMDDSLAELPLPQLPAAAAALAACGKPQHRRPHEGAASALLDPMRTPTICALSTEALVPVKSRRSKRSRASVWSLSGAPLSDSTSSSSTATTSSCSSSASFSPFLQYVDFPALVASDLLDEQPRSKKSKHGKNGKQKPKKRGRKPKHQQPPHLAAAAGGGAALPATGDRRCSHCGVQKTPQWRAGPEGAKTLCNACGVRYKSGRLLPEYRPACSPTFVSSLHSNSHRKVLEMRRKKETPVIVAAAAPAVASF

SEQ ID NO: 1916 - protein, 277 aa, Nicotiana tabacum
MGRAPCCEKMGLKKGPWTPEEDQILISFIQQNGHGNWRALPKQAGLLRCGKSCRLRWTNYLRPDIKRGNFTKEEEDTIIQLHEMLGNRWSAIAAKLPGRTDNEIKNVWHTHLKKKLKDYKPPQNPKRHSKNHDSKGPTTSESSNNSHLTFIYTQKHIIDSSVPAPNSPQISSSTEMSTVTLVDDHQMVIKQEEMESSEYFPEIDESFWTDKLSTDNNWSNTHDHVMVTADQELQVQLPFSSLKEENVDMLTTKMEDDMDFWYNVFIKTDDLPELPEF

SEQ ID NO: 1917 - protein, 308 aa, Triticum aestivum
MSFHYPDHGLAMDAAAAAAAAASSPNPSFSPGGGGGEREKAAIAAHPLYERLLEAHVACLRVATPVDQLPRIDAQIAARPPPLAAAAAAGGPSGGEELDLFMTHYVLLLCSFKEQLQQHVRVHAMEAVMGCWELEQSLQSLTGASPGEGTGATMSDDEDNQVDSETNMFDGNDGSDGMGFGPLILTEGERSLIERVRHELKSELKQGYKEKLVDIREEIMRKRRAGKLPGDTAATLKAWWQAHSKWPYPTEDDKARLVQETGLQLKQINNWFINQRKRNWHSSNTASSSEKTKKKRNVTGNDGTEQSW

SEQ ID NO: 1918 - protein, 366 aa, Arabidopsis thaliana
MGRHSCCYKQKLRKGLWSPEEDEKLLTHITNHGHGCWSSVPKLAGLQRCGKSCRLRWINYLRPDLKRGAFSPEEENLIVELHAVLGNRWSQIASRLPGRTDNEIKNLWNSSIKKKLKQRGIDPNTHKPISEVESFSDKDKPTTSNNKRSGNDHKSPSSSSATNQDFFLERPSDLSDYFGFQKLNFNSNLGLSVTTDSSLCSMIPPQFSPGNMVGSVLQTPVCVKPSISLPPDNNSSSPISGGDHVKLAAPNWEFQTNNNNTSNFFDNGGFSWSIPNSSTSSSQVKPNHNFEEIKWSEYLNTPFFIGSTVQSQTSQPIYIKSETDYLANVSNMTDPWSQNENLGTTETSDVFSKDLQRMAVSFGQSL

SEQ ID NO: 1919 - protein, 188 aa, Saccharum hybrid cultivar
SSVVTAAAAIQADPAEKPRAPKAQVVGWPPVRSFRKNIMSVQSDKGAGGSKDADKSSPPPAAAAAVGGAAFVKVSLDGAPYLRKVDLKMYKMYKSYQELSKALEKMFSSTIGSCGSQGMNGMNESKLVDLLNGSEYVPTYEDKEGDWMLVGDVPWEMFVESCKRLRIMKGSEAIGLAPRAMEKCKNRS

SEQ ID NO: 1920 - protein, 179 aa, Pisum sativum
MAREGLGLEITELRLGLSCGEPKKNEKKRMFSEIDGGVEENGGSGDRKSVDKKNQVVGWPPVCSYRKKNMNEGSKMYMKVSMDGAPYLRKIDLCLHKGYLELALALEKLFDCCGIEEALKDAENCEHVPIYEDKDGDWMLVGDVPWEMFIESCKRLRIMKRSDAKGFDLQPKGSLKRFI

SEQ ID NO: 1921 - protein, 235 aa, Chloranthus spicatus
  misc_feature (108)..(108): Xaa can be any naturally occurring amino acid
MGRGRVQLKRIENKINRQVTFSKRRSGLLKKAHEISVLCDAEVALIVFSAKGKLSEYSTDSRMDRILERYERISYAERELRSTDHRPDGNWNLEYSKLKAKLEGLQRXQRHYMGEDLEKLSLKELQPLENQLDNALKHIRTRKTQVMMDSIAELQAREKLLQEQNSMLEKKIQEKNALAHQAHWEQQNQTQSPPPFLLTHQHPTINNSTYQARGEEDRVRTNSLMPPWMLRHVNG

SEQ ID NO: 1922 - protein, 88 aa, Triticum aestivum
MSSGSPSRSTSPSSDSEWSKKENKMFEEALAYYGVSAPNLWEKVASAMGGTKSAEEVRRHFQLLVDDVDSIEHGRIPFPKYKTQGFWT

SEQ ID NO: 1923 - protein, 836 aa, Oryza sativa (japonica cultivar-group)
MATAEVGGGGGGGGGGGEDALFTELWSACAGPLVTVPRVGEKVFYFPQGHIEQVEASTNQVGEQRMQLYNLPWKILCEVMNVELKAEPDTDEVYAQLTLLPESKQQEDNGSTEEEVPSAPAAGHVRPRVHSFCKTLTASDTSTHGGFSVLRRHADECLPPLDMSRQPPTQELVAKDLHGVEWRFRHIFRGQPRRHLLQSGWSVFVSAKRLVAGDAFIFLRGENGELRVGVRRAMRQQTNVPSSVISSHSMHLGVLATAWHAVNTGTMFTVYYKPRTSPAEFVVPYDRYMESLKQNYSIGMRFKMRFEGEEAPEQRFTGTIVGMGDSDPAGWPESKWRSLKVRWDEASSIPRPERVSPWQIEPAVSPPPVNPLPVPRTKRLRPNATALPADSSAIAKEAATKVVVESEPNGTQRTFQTQENATPKSGFGNSSELESAQKSIMRPSGFDREKNNTPIQWKLGSDGRMQMSKPESYSEMLSGFQPPKDVQIPQGFWSLPEQITAGHSNFWHTVNAQYQDQQSNHNMFPSSWSFMPPNTRLGLNKQNYSMIQEAGVLSQRPGNTKFGNGVYAALPGRGTEQYSGGWFGHMMPNSHMDDTQPRLIKPKPLVVAHGDVQKAKGASCKLFGIHLDSPAKSEPLKSPSSVVYDGTPQTPGATEWRRPDVTEVEKCSDPSKAMKPLDTPQPDSVPEKPSSQQASRNMSCKSQGVSTRSCKKVHKQGIALGRSVDLTKFNGYEELIAELDDMFDFNGELKGPKKEWMVVYTDNEGDMMLVGDDPWIEFCDMVHKIFIYTREEVQRMNPGTLNSRSEDSHANSMERGSVGREMRGCLSTSSLNSENC

SEQ ID NO: 1924 - protein, 352 aa, Gossypium hirsutum
MGHHSCCNKQKVKRGLWSPEEDEKLINYITTYGHGCWSSVPKLAGLQRCGKSCRLRWINYLRPDLKRGSFSPQEAALIIELHSILGNRWAQIAKHLPGRTDNEVKNFWNSSIKKKLISHDHVPALASFADVHSSNHTEEAGFISLNANPNLILAAQQDQLYLSPTAPVLQSFGHHADLVHHHFPLTPMLPPPPPPSNTASFDPAWTLPFGPQHDQDDDQHHQVQVFNNEAAQNFVSDKLMNPPFDNPLMGPPTVPKLCEILEGNMVCNIPQTPSVSLENNIDPLVSRLSSCFPPIPAGSNYAHDMQVGASQMEYIDTIITSIPSSSSSSSLSALSSGQYLTNPNLPSSSWDP

SEQ ID NO: 1925 - protein, 466 aa, Oryza sativa
MWMQDDGGGDQEHGQAAPPGQEQHHHDQHLMALAAAAAGGAGFGAAQAPAPLLDEDWYFDAAGGGGGGAHGSMMLGLSSVHGGIGAGTSGGGHGQQFSLLNMGAAAAPFDVSGFDLGIACGGVGGGGDVVSFLGGGNASNTALLPVGNAGFLGTFGGFGTAASQMPEFGGLAGFDMFDAGAPTLFQKRALRRNAGEDDDDKKRKAAAGAGAGALSADGADMVLDDGDDDGLSIDASGGLNYDSEDARGGEDSGAKKESNANSTVTGDGKGKKKGMPAKNLMAERRRRKKLNDRLYMLRSVVPKISKMDRASILGDAIEYLKELLQKINDLQNELESSPATSSLPPTPTSFHPLTPTLPTLPSRIKEEICPSALPSPTGQQPRVEVRLREGRAVNIHMFCARRPGLLLSAMRAVEGLGLDVQQAVISCFNGFTLDIFKAEQCKDGPGLLPEEIKAVLMQSAGFHTMI

SEQ ID NO: 1926 - protein, 719 aa, Oryza sativa
MEINSSGEEAVVKVRKPYTITKQRERWTEAEHNRFLEALKLYGRAWQRIEEHVGTKTAVQIRSHAQKFFTKLEKEAINNGTSPGQAHDIDIPPPRPKRKPNSPYPRKSCLSSETSTREVQNDKATISNMTNNSTAQMAGDAALEKLQRKEISEKGSCSEVLNLFREVPSASFSSVNKSSSNHGASRGLEPTKTEVKDVVILERDSISNGAGKDAKDINDQEMERLNGIHISSKPDHSHENCLDTSSQQFKPKSNSVETTYVDWSAAKASHYQMDRNGVTGFQATGTEGSHPDQTSDQMGGASGTMNQCIHPTLPVDPKFDGNAAAQPFPHNYAAFAPMMQCHCNQDAYRSFANMSSTFSSMLVSTLLSNPAIHAAARLAASYWPTVDGNTPDPNQENLSESAQGSHAGSPPNMASIVTATVAAASAWWATQGLLPLFPPPIAFPFVPAPSAPFSTADVQRAQEKDIDCPMDNAQKELQETRKQDNFEAMKVIVSSETDESGKGEVSLHTELKISPADKADTKPAAGAETSDVFGNKKKQDRSSCGSNTPSSSDIEADNAPENQEKANDKAKQASCSNSSAGDNNHRRFRSSASTSDSWKEVSEEGRLAFDALFSRERLPQSFSPPQVEGSKEISKEEEDEVTTVTVDLNKNAAIIDQELDTADEPRASFPNELSNLKLKSRRTGFKPYKRCSVEAKENRVPASDEVGTKRIRLESEAST

SEQ ID NO: 1927 - protein, 352 aa, Gossypium hirsutum
MGHHSCCNKQKVKRGLWSPEEDEKLINYITTYGHGCWSSVPKLAGLQRCGKSCRLRWINYLRPDLKRGSFSPQEAALIIELHSILGNRWAQIAKHLPGRTDNEVKNFWNSSIKKKLISHDHVPALASFADVHSSNHTEEAGFISLNANPNLILTAQQDQLYLSPTAPVLQSFGHHADLVHHHFPLTPMLPPPPPPSNTASFDPAWTLPFGPQHDQDDDQHHQVQVFNNEAAQNFVSDKLMNPPFDNPLMGPPTVPKLCEILEGNMVCNIPQTSSVSLETNIDPLVSRLSSCFPPIPAGSNYAHDMQVGASQMEYIDNIITSIPSSSSSSSLSALSSGQYLTNPNLPSSSWDP

SEQ ID NO: 1928 - protein, 171 aa, Glycine max
MAESDNESGGHTGNASGSNEFSGCREQDRFLPIANVSRIMKKALPANAKISKEAKETVQECVSEFISFITGEASDKCQKEKRKTINGDDLLWAMTTLGFEEYVEPLKVYLHKYRELEGEKTAMMGRPHERDEGYGHATPMMIMMGHQQQQHQGHVYGSGTTTGSASSARTR

SEQ ID NO: 1929 - protein, 644 aa, Oryza sativa
MMGGGLVMDQGMMFPGVHNFVDLLQQNGGDKNLGFGALVPQTSSGEQCVMGEGDLVDPPPESFPDAGEDDSDDDVEDIEELERRMWRDRMKLKRLKELQLSRGKDPAGGVVGDPSKPRQSQEQARRKKMSRAQDGILKYMLKMMEVCRAQGFVYGIIPEKGKPVSGASDNLRGWWKEKVRFDRNGPAAIAKYQADNAVPGFESELASGTGSPHSLQELQDTTLGSLLSALMQHCDPPQRRYPLEKGVPPPWWPTGDEEWWPELGIPKDQGPPPYKKPHDLKKAWKVSVLTAVIKHMSPDIEKIRRLVRQSKCLQDKMTAKEISTWLAVVKQEEELYLKLNPGARPPAPTGGITSAISFNASSSEYDVDVVDDCKGDEAGNQKAVVVADPTAFNLGAAMLNDKFLMPASMKEEATDVEFIQKRSASGAEPELMLNNRVYTCHNVQCPHSDYGYGFLDRNARNSHQYTCKYNDPLQQSTENKPSPPAIFPATYNTPNQALNNLDFGLPMDGQRSITELMNMYDNNFVANKNLSNDNATIMERPNAVNPRIQIEEGFFGQGSGIGGSNGGVFEDVNGMMQQPQQTTPAQQQFFIRDDTPFGNQMGDINGASEFRFGSGFNMSGAVEYPGAMQGQQKNDGASEFEELE

SEQ ID NO: 1930 - protein, 519 aa, Perilla frutescens
MVEPPKSRVESLLQAAVQTAQWTYSLFWQLCPQKGTLVWSDGYYNGAIKTRKTVQPTEDVAEELTLQRSQQLRELYESLSAGETNHQPRRPSASLSPEDLTESEWFYLMCVSFSFPPGVGLPGKAYADRQHIWLTRANEADSKLFSRTILAKTVLCIPLLDGVVELGTTEKIEEDIGVIERVKSLFSESPLIRAPKSSEHSTSNPPNPSASRFYSRAEEEEEEEEEEEEDELTRPLNSAVQPLMQLDMYMSAQDIRVGSPDNDSSNNLDSDLRLQPTHSAAEEDSQYYSQTVSNILENQTSNRWSKYSAFCKWARRSSSSCHRHNLLLDGASQWVLKYVLLTVPLLHTRATPTPQLDDLINGNHVMAERRRREKLNQRFIVLRSMVPFITKMDKASILADTIDYLKQLKKRIQELESKIGDMKKREIRMSDADASVEVSIIESDALVEIECSQKPGLLSDFIQALRGLGIQITTVQSSINTTHATLTAHFRAKVKENVNGRKPSIMEVKRTIEQIIQRC

SEQ ID NO: 1931 - protein, 270 aa, Populus tremula x Populus tremuloides
MGRSPCCEKAHTNKGAWTKEEDDRLVAYIRAHGEGCWRSLPKAAGLLRCGKSCRLRWINYLRPDLKRGNFTEAEDELIIKLHSLLGNSRWSLIAGRLPGRTDNEIKNYWNTHIRRKLLNRGIDPATHRPLNEPVQEATTTISFTTTTTSVEEESRGSIIKEEIKEKLISATAFVCTEAKTQVQERCPDLNLELGISLPSQNQPDHHQPFKTGGSRSLCFACSLGLQNSKDCSCNVIVSTVGSSGSTSTKNGYDFLGMKSGVLDYRSLEMK

SEQ ID NO: 1932 - protein, 217 aa, Populus tremula x Populus tremuloides
MEEGRFQNGGGLGVKVMTDEQMEMLRKQISVYATICEQLVEMHKAVSAQQDFAGMGLGNPYCDPLLSSAVHKIGSRQRWTPKPAQLQILEQIFEQCNATPGRQKIKDITRELAQHGQISETNVYNWFQNRRARSKRKQSAVVPNNGESEMETDIESLKEKKTRAEDSQPDENTTPMADHMYFNSPDIGFDQLMGKIESPGPGSCIPYWQMEQYDLFG

SEQ ID NO: 1933 - protein, 403 aa, Oryza sativa
MGQDEVEVGAEKKDQELPEVEVVEEEEEEGSKKAAAGCDYCGDAAAVVYCRADAARLCLPCDRHVHGANGVCSRHARAPLCAACAAAGAVFRRGAGGFLCSNCDFSRHRHGGERDPAAPLHDRSTVHPYTGCPSALDLAALLGISYSDKAAAATAAAGGDDGGWWAIWEEPQVLSLEDLIVPTTSCHGFEPLLTPSSPKIQNSPDGKVNEEVIRQLTELANSDGGGAQIWAHREAAQAGDHQLPSWGTTTQHNTGHGNFGTANSNEVATMPTPGYENGGWDNSDYPALNDPCKVEFTYEQPPASSAEACISSFVQMSELCPSMSNGSSMEETHQTNPGNGTPMQVLPKMPEFVPCPDRNLVISRYKEKRKTRRFDRQVRYESRKARADSRLRIKGRFAKVNQI

SEQ ID NO: 1934 - protein, 218 aa, Sisymbrium irio
MAAFEESTDLDAIQGHLFEDFMVSDGFMGDFDFNASFVSGLWCIEPVMNQVPKQEPDSPVLDPDSFVKEFLQVEAESSTSTGTTELNSSSQETDQSISTRKKSKRFEEQEEEEPRHYRGVRRRPWGKFAAEIRDPAKKGSRIWLGTFESDVDAARAYDCAAFKLRGRKAVLNFPLDAGKYEAPANSGRKRKRSDVQGELQRSQSNSSSSSSDGETTCE

SEQ ID NO: 1935 - protein, 270 aa, Hordeum vulgare subsp. vulgare
MEEEGGARKAVLFRLFGVEVRGAEEEEEDDAEPMELKKSTSMPNLASIGPILPRGEASASHDKGYASDDGELASTPQLKRRRRKAQERKRGIPWTEEEHRKFLEGLKQLGKGDWRGISKNFVTTRTATQVASHAQKYFLRQTNPGKKKRRASLFDVGIPAGHGYDDQLPSPHSVGTKLAPAEKILHTDRGDVPLPSYSEVIRGNNNNNTQMQADELTDHAKKRSKFPTGMSLTAMAASGLELAMSSSPSSILELSIGPPRHCAVDAIKVL

SEQ ID NO: 1936 - protein, 261 aa, Hordeum vulgare subsp. vulgare
MLCEGGGGGSTSGSGLRLFGVQVHVAAGRSARAGASMRKSYSMDCLQLAAAPSSIVSPSSSSSSSVLLSIDEGLERASNGYLSDGPHGRLVQERKKGVPWSEEEHRLFLVGLEKLGKGDWRGISRSYVTTRTPTQVASHAQKFFLRQSSMGKKKRRSSLFDMVPICENGIRVSEPLTNNSENASTSLPRYNSPNMASIDLNSTQEDNLAGFPLWSASGASPRAPFPAVLMEQPPHGHGHGHHCSPLDVELSMSLSPPSIGT

SEQ ID NO: 1937 - protein, 898 aa, Musa acuminata
MLILILAVFVPSYTEEPRCLNSELWHACAGPLVSLPAVGSRVAASTNKEVDSQIPNYPSLPPQLICQLHNVTMHADVETDEVYAQMTLQPLSAQEQKDPYLPADLGTPSKQPTNYFCKTLTASDTSTHGGFSVPRRAAEKVFPPLDFSQQPPAQELVARDLHGNEWKFRHIFRGQPKRHLLTTGWSVFVSAKRLVAGDSVLFIWNENNQLLLGIRRANRPQTVMPSSVLSSDSMHIGLLAAAAHAAATNSRFTIFYNPRASPSEFVIPLTKYVKAVYHTRVSVGMRFRMLFETEESSVRRYMGTITGISDLDPVRWPNSHWRSVKVGWDESTAGEKQPRVSLWEIEPLTTFPMYPSSFPLRFKRPWPTGLPFFHGGRDDEFSLNSPLMWLRDGGNPALQSLNFQGVGVTPWMQPRLGTSMLALQPDMHQTVAAVALQEMQTMDLTKQVTPAMLQFQQPQNTTSRSTPILQSQILQHAQPQSHQPLLHTIQGNQMQSQAQSQFLQHHLQQGHSFAEQQQQQQHNLQLQIPEHQQFQQQRVLPAYQQVPYGAANLSQLSSSSQSQSTTLNMISPSSQLKDFPDSNGNSVSASSVSPLDNILHQISPEETSQLLSLPRYAQPVTSNPWSSKRIAVESMLPSGAQSVLSQVEQIGSGQPNIPLQSVVLPPFPGRECSMNQDGNMDIQNQHMFGVNIDSSISVQNGIRSLGTGVNGTNSTNIPYAACNLLRSAGNDFPINQAVNGSNGLDESGLLQSTENVDRVNSQSGTFVKVYKSGSFGRSLDITRFSSYHELRSELGHLFGLEGQLEDPLRSGWQLVFVDREDDVLLVGDDPWQEFVNSVSCIKILSPEEVQQMGKQGVDFVNSAPIKRLQSNGCDDYVSQQHSRNLSAARITSVGSFKY

SEQ ID NO: 1938 - protein, 226 aa, Arabidopsis thaliana
MSSSDSVNNGVNSRMYFRNPSFSNVILNDNWSDLPLSVDDSQDMAIYNTLRDAVSSAWTPSVPPVTSPAEEDKPPATKASGSHAPRQKGMQYRGVRRRPWGKFAAEIRDPKKNGARVWLGTYETPEDAAVAYDRAAFQLRGSKAKLNFPHLIGSCKYEPVRIRPRRRSPEPSVSDQLTSEQKRESHVDDGKSSLVVPELDFTVDQFYFDGSLLMDQSECSYSDNRI

SEQ ID NO: 1939 - protein, 355 aa, Lycopersicon esculentum
MESTDSSTGTRHQPQLPPGFRFHPTDEELIVHYLKKRVAGAPIPVDIIGEIDLYKFDPWELPAKAIFGEQEWFFFSPRDRKYPNGARPNRAATSGYWKATGTDKPVFTSGGTQKVGVKKALVFYGGKPPKGVKTNWIMHEYRVVENKTNNKPLGCDNIVANKKGSLRLDDWVLCRIYKKNNTQRSIDDLHDMLGSIPQNVPNSILQGIKPSNYGTILLENESNMYDGIMNNTNDIINNNNRSIPQISSKRTMHGGLYWNNDEATTTTTTIDRNHSPNTKRFLVENNEDDGLNMNNISRITNHEQSSSIANFLSQFPQNPSIQQQQQQQEEVLGSLNDGVVFRQPYNQVTGMNWYS

SEQ ID NO: 1940 - protein, 197 aa, Brassica napus
  misc_feature (24)..(24): Xaa can be any naturally occurring amino acid
KNKPISPLSLSTLISISRSNSPLXQMPLSRSLLSRRFSISFRESQGGKTPPEADSHQPPPPPTTKMMLPPPPSNGAAGSSWSAMLPELLGEIIRRVEGSEDQWPHRRDVVSCACLSTKWREIAQEMVRSPVNSGTITFPSCLKLPGPREFSNQCLIKRNKKTSTFYLYLPLTPSFTDNGKFLLAARTFTNGAYTEYI

SEQ ID NO: 1941 - protein, 405 aa, Arabidopsis thaliana
  misc_feature (383)..(383): Xaa can be any naturally occurring amino acid
MAFHNNHFNHFTDQQQHQPPPPPQQQQQQHFQESAPPNWLLRSDNNFLNLHTAASAAATSSDSPSSAAANQWLSRSSSFLQRGNTANNNNNETSGDVIEDVPGGEESMIGEKKEAERWQNARHKAEILSHPLYEQLLSAHVACLRIATPVDQLPRIDAQLAQSQNVVAKYSTLEAAQGLLAGDDKELDHFMTHYVLLLCSFKEQLQQHVRVHAMEAVMACWEIEQSLQSFTGVSPGEGTGATMSEDEDEQVESDAHLFDGSLDGLGFGPLVPTESERSLMERVRQELKHELKQGYKEKIVDIREEILRKRRAGKLPGDTTSVLKSWWQSHSKWPYPTEEDKARLVQETGLQLKQINNWFINQRKRNWHSNPSSSTVSKNKRRXMQVKTAEETVEIKLACRDPKAL

SEQ ID NO: 1942 - protein, 635 aa, Triticum aestivum
  misc_feature (459)..(459): Xaa can be any naturally occurring amino acid
IASTHASVQQNGAHENLGFGSLMPQTSSGDQCVMGEGDLVDPPTNNFPDAGEDDSDDDVDDIEELERRMWRDRMKLKRLKELQQSRGKEQAAGGGGAGDGLKPRQSQEQARRKKMSRAQDGILKYMLKMMEVCRAQGFVYGIIPEKGKPVSGASDNLRAWWKEKVRFDRNGPAAIAKYQADNAVPGSESELASGTASPHSLQELQDTTLGSLLSALMQHCDPPQRRFPLEKGISPPWWPSGDEEWWPGLGIPKDQGPPPYKKPHDLKKAWKVSVLTAVIARGSPDIEKIRRLVRQSKCLQDKMTAKEISTWLAVVKQEEELFMRLHPGVRPPASAGGIASAISFNASSSEYDVDLADDCKGDEAGTHKMAMDDPTAFNLGAAILNDKFLMQAPMKEETGDMEYVQKRSAVAAEPELMLNNRVYTCNNVQCPHSDYGYGFLDRNARNSHRYTCKYNDPLXQARENKATPPAPPQVFPAAYNQQNHGLNNLDFGLPMDGQRSIAELMNMYDTTFPATNKNMGNDDVTIIERPNAITPVMDEGFFGQGNGIGGNGDSMFSDVSNMMQQQQAQQPQQQQQQQQQAPAQQQFFIGDDAQAQFGNQMGSISGASDFRFGSGFNMSGTVDYPQKNDGPNWYY

SEQ ID NO: 1943 - protein, 63 aa, Arabidopsis thaliana
KHYRGVRQRPWGKFAAEIRDPAKNGARVWLGTFETAEDAALAYDRAAFRMRGSRALLNFPLRV

SEQ ID NO: 1944 - protein, 249 aa, Oryza sativa
  misc_feature (232)..(232): Xaa can be any naturally occurring amino acid
MDRSEMGRGRVELKRIENKINRQVTFSKRRNGLLKKAYELSVLCDAEVALIIFSSRGKLYEFGSAGINKTLEKYNSCCYNAQGSNSALAGGEHQSWYQEMSRLKTKLECLQRSQRHMLGEDLGPLSIKELQQLEKQLEYSLSQARQRKTQIMMEQVDDLRRKERQLGELNKQLKNKLEAEADSSNCRSAIQDSWVHGTVVSGGRVLNAQPPPDIDCEPTLQIGYYQFVRPEXRPIQEAMEEEGIRTTTL

SEQ ID NO: 1945 - protein, 235 aa, Oryza sativa
  misc_feature (18)..(18): Xaa can be any naturally occurring amino acid
  misc_feature (218)..(218): Xaa can be any naturally occurring amino acid
MVGGDLDFSNPDTFLCPXAVGGADPDGSCSMDSYFDDILKDTEHHACTHTHTCNPPVHDLSHTHTCVHVHTKIVSAPSDTPSDAAETAESPTENNASKKRPSGNRAAVRKYREKEKAHTASLEEEVVHLRALNQQLMKKLQNHATLDAEVSRLRCLLVDIRGRIEGEIGAFPYQRPVKNIDLVSSVDQGSYLGGAQVMNSCDFRCVEQIYWRPRIAVXTMDEDGAVNGKWWAKCV

SEQ ID NO: 1946 - protein, 204 aa, Hypocrea jecorina
MSDSPQSPPKDVDQGAQSPDEEGQMNDNQEPHSAGGTGYEFEGVKEQDRWLPIANVARIMKNALPDNAKIAKEAKECMQECVSEFISFITSEASEKCQQEKRKTVNGEDILFAMTSLGFENYAEALKVYLSKYREQQNQSNRDRVLENNTWGNAMIPGEKTEPGTTNPEYAPPEGANPPESGAEPNYMYTSHAGHNGAGAGENY

SEQ ID NO: 1947 - protein, 261 aa, Populus tremula x Populus tremuloides
KLVFYDCQSIAGRMDWDNNQENHQDSHQNQRECRNGINGTNVNVNGNGGTNMLYVKVMTDEQLETLRKQIAVYAAICEQLVEMHKTLSAQQDLAGGRLGNLYCDPLMASGGHKITARQRWTPTPVQLQILERIFDQGNGTPSKQKIKEITSELSQHGQISETNVYNWFQNRRARSKRKQLVASSNNAESEVETEVDSLNEKKKPEIFHAQQNPPRAEDLCFQSPEISSELHFLGDDHLTGKVGVPGNYNLYDQAEDYGMAG

SEQ ID NO: 1948 - protein, 226 aa, Thalictrum dioicum
MGRGKIEIKRIENTTNRQVTFCKRRNGLLKKAYELSVLCEAEVALVVFSSRGRLYEYSNNSVKKTIERYKKASTDSPNSGSVYEANVQFYQQEASKMRNQIASLQNHNRNLLGESLSNLNIRELRQIEKKIEGGISKIRAKKNELLFSEIEYMQKREIDLQTDNKYLGAMIAANERVPPEHMNLMPANEYHIMSSAPFDSRNFLPANLLDHNNNYSHSDQTTLQLG

SEQ ID NO: 1949 - protein, 222 aa, Zea mays
LEAGRPNRFACSSAPCRTHLTPGRQEQDSHCPTEPEALRSERAGAPPSPMARPQQRYRGVRQRHWGSWVSDIRHPLLKTRIWLGTFETAEDAARAYDEAARIMCGPRVRTNFPEDAAADGQGQPAATALLSPALVAKLHRFNLASVQAARGRADDSAAAAASAPAVLARIAPMPASNASMRIAPLTSAAVAAGHWSGDFLEEQYVDQMIEELLDSNFSVEIY

SEQ ID NO: 1950 - protein, 843 aa, Glycine max; identical to SEQ ID NO: 185

SEQ ID NO: 1951 - protein, 298 aa, Zea mays
MISGNLNNEELGGGGCTKAEGPGAAGGAGAVVAKSPVLSSSRHWPPSTESRIVRVSRVFGGKDRHSKVRTVKGLRDRRVRLSVPTAIQLYDLQDRLGLSQPSKVVDWLLDAAQDEIDKLPPLQFPPQGQDLVAHLPPSMVAPFANVAADRAAAAAAAANASAAMAEGGKRHCHGGIKGLMGMGLNNSIGLANATMPLAHGLYYTPGESWTNGGNAAVHDHQVSHGGTSPQTVAHHSPFSSLLSLAAPGPQLVFYSPEGGGFAMKEATDHQFAVDSLDHSQGQLSLSSARSFLHPGNQG

SEQ ID NO: 1952 - protein, 216 aa, Sanguinaria canadensis
IENTTNRQVTFCKRRNGLLKKAYELSVLCDAEVALIVFSNRGRLYEYANNSVKSTIERYKKTCQDPSNSGCAVEANTQFYQQEASKLRQQIGFLQNSNRNLTGEALSSMTVKELKQLETRLEKGISRIRSKKNELLFSEIEYMQKREIDLQNDNMYLRAKIAENERAQQHMNLMPGNEYDVMTSSAYDSRNFLQVNLLESTNHHYSRQEQTALQLG

SEQ ID NO: 1953 - protein, 399 aa, Zea mays
MGRHSCCYKQKLRKGLWSPEEDEKLMNHITKHGHGCWSSIPKLAGLQRCGKSCRLRWINYLRPDLKRGAFSQDEEDLIIELHAVLGNRWSQIAAQLPGRTDNEIKNLWNSCIKKKLRQKGIDPNTHKPLTEADRSGAAPTISTERTSGSSEINPSSAGALGNLSHLLSETAQSSMLMPVYDKNRAETPNLARPKVPPKELFLEQLTAGHESPSTCRSSGQTLYFPFQQPLGYNSESGSGDGANMNSLWFNQSDFNCSTISTVMPPVSPSALSTSMGLNLPPDNPRHGGTGIGSTAVDSFYWGCVFQWTDIGQEKDTRAHLVEELKWPDLLHGTFAETTTAMQNQSQTLYDDVIKAESQFSMEGICASWFQNQQPQQQLQATPDMYDKDLQRMQLSFENI

SEQ ID NO: 1954 - protein, 118 aa, Brassica napus
  misc_feature (111)..(112): Xaa can be any naturally occurring amino acid
MDSRELHHHQQHQHQQQLQQQLQPSPSTQQQQQQPSMRFGIEQQQQVKKKRGRPRKYTPDASNIGLALAPTSPLPSASNSHGGGNDGGGDSGGGGGGGGANSTDPPAKRNXXRPPGSG

SEQ ID NO: 1955 - protein, 281 aa, Nicotiana tabacum
MVRAPCCEKMGLKKGPWTPEEDQVLVSYIQTNGHGNWRALPKLAGLLRCGKSCRLRWTNYLRPDIKRGNFTREEEDSIIQLHEMLGNRWSAIAARLPGRTDNEIKNVWHTHLKKRLKNYQPPQNSKKHSKNNLDSKAPSTSQTFNNSDNFSNIQEDINGPVTGPNSPQRSSSEMSTVTADSTAMTTITIDDQNMFKQLDEMNSSESFIPEIDESFWTNDLSTGDNSNFDMEGTGEELQVQFPFSSVKQESMDMVGTKLEDDMDFWYNVFIKSGDLLDLPEF

SEQ ID NO: 1956 - protein, 286 aa, Arabidopsis thaliana
MEADNGGPNSSHASKQRLRWTHELHERFVDAVAQLGGPDRATPKGVLRVMGVQGLTIYHVKSHLQKYRLAKYLPDSSSEGKKTDKKESGDMLSGLDGSSGMQITEALKLQMEVQKRLHEQLEVQRQLQLRIEAQGKYLKKIIEEQQRLSGVLGEPSAPVTGDSDPATPAPTSESPLQDKSGKDCGPDKSLSVDESLSSYREPLTPDSGCNIGSPDESTGEERLSKKPRLVRGAAGYTPDIVVGHPILESGLNTSYHQSDHVLAFDQPSTSLLGAEEQLDKVSGDNL

SEQ ID NO: 1957 - protein, 241 aa, Elaeis guineensis
MGRGRVELKRIENKINRQVTFSKRRSGLLKKAYELSVLCDAEIALIIFSSRGKLYEFGSVGTSKTLERYQRCCYTSQDSNFADQETQNWYQEMAKLKAKFESLQRSQRHLLGEDLGPLTVKELQQLERQLESALSQARQRKAQIMLDQMEELRKKERHLGEINKQLKDRLDAESASFRAIQGSWASDGVVTNNAFSLQPSQSNDMDCEPTLQIGFPQLVPPEAAITRNTGGENNFMLGWVL

SEQ ID NO: 1958 - protein, 140 aa, Brassica napus
  misc_feature (5)..(5): Xaa can be any naturally occurring amino acid
  misc_feature (12)..(12): Xaa can be any naturally occurring amino acid
  misc_feature (17)..(17): Xaa can be any naturally occurring amino acid
  misc_feature (23)..(23): Xaa can be any naturally occurring amino acid
  misc_feature (32)..(32): Xaa can be any naturally occurring amino acid
  misc_feature (51)..(52): Xaa can be any naturally occurring amino acid
  misc_feature (127)..(127): Xaa can be any naturally occurring amino acid
YPVAXISYELNXLGSRXPRRMRXVMDTLPTSXMHPQRAAGSSNSLRDPPLXXSNKTPRWHEQLRCWCLNFHGRVTVASVKNFQLVAVGDRETEQATSERIILQFGKVGKDMFTMDYGYPISAFQAFXICLSSFETRIACE

SEQ ID NO: 1959 - protein, 164 aa, Cleisostoma racemiferum
IENKINRQVTFAKRRNGLLKKAYELSVLCDAEVALIIFSNRGKLYEFCSSTSMLKTLEKYQKCNFGSPESTIISRETQSSQQEYLKLKSRVEALQRSQRNLLGEDLGPLGSKELEQLERQLDSSLKQIRSTRTQFMLDQLADLQRREHMLCEANKALKRRFEES

SEQ ID NO: 1960 - protein, 207 aa, Arabidopsis arenosa
MASFEESSDLEAIQSHLFEDLLACDGFMGDFDFDASFVSGLWCIESQVPKQEPDSPVLDPDSFVNEFLQVEGESSSSSSPELNSSSSTYETDQSVKKAERFEEEEEARHYRGVRRRPWGKFAAEIRDPAKKGSRIWLGTFESDVDAARAYDCAAFKLRGRKAVLNFPLDAGKYEAPANSGRKRKRSDVQEELQRTQSNSSSSSCDAF

SEQ ID NO: 1961 - protein, 300 aa, Zea mays
  misc_feature (88)..(88): Xaa can be any naturally occurring amino acid
SGAFTHCCCSVLASGSHRSADDCLLCPSFPSQWQAEDLQCLPSSARPTPPAAQHRGRGETQDHQLAWVQQSKKKKFRGVRQRHWGSWXVSEIRHPLLKRRVWLGTFETAEEAARAYDEAAVLMSGRNAKTNFPVLPCGRTRGGGGGGGSSGNNTNASASASASTSTSSLSQSQVLSAKLRRCCKAPSPSLTCLRLDPERSHIGVWHKGAGARADSSWVMTVQLSDKDAAPAPSATSSATATTTTAASHPPPATVVVVDDEERIALQMIEELLGGGGGPVSQQPLGNGMLQIAAAGGGLVI

SEQ ID NO: 1962 - protein, 236 aa, Oryza sativa
IKSIENKITRQVTFSKRRNGLLKKAYELSVLCDAEVALIIFSSRGKLYEFGSAGINKTLEKYNSCCYNAQGSNSALAGGEHQSWYQEMSRLKTKLECLQRSQRHMLGEDLGPLSIKELQQLEKQLEYSLSQARQRKTQIMMEQVDDLRRKERQLGELNKQLKNKLEAEADSSNCRSAIQDSWVHGTVVSGGRVLNAQPPPDIDCEPTLQIGYYQFVRPERPIQEAMEEEGIRTTTL

SEQ ID NO: 1963 - protein, 192 aa, Triticum aestivum
GGGRHRRLLSATPLRPETDGGKPQEVKLREAGHGRRFWDVKVVLDADGHMYLERGWEQFARAHDLRLGYFLVFSYDGDAVLTVKVFDVSMCRRHYKHDGDTSSESSSDGDSGSSNTSDGGSGGNNRSLVEMDVEDGPTGQFSAMLRKCNLGMKQEQYLNVPVDFQLAHGYAERSKVELRMRGKSWLVHLKHN

SEQ ID NO: 1964 - protein, 437 aa, Triticum aestivum
MEHGDGPGGPDPGGQQREEEISDSESGSESLEISDLKKRMWKDQMLLTRLEGRAGAKGVAPAPAAGASSSSSSGQEEPPDVRCRRKAMLRAQDGVLRHMLRMMEACNARGFVYGVIDEAGEPMSGSSDSLRGWWKENVSFDRAGPMGLAGPMGESPVALASSLHRLPDIQDSTLGSVLSALIQHCEPPQRSFPLERGLAPPWWPTGHEPWWGTQGEMQAHQGVPPYRKPHDLKKAWKISLLSAVIKHMSPRFDQMRKLVWQSKRLQQKMSAKESETWSKVLRQEEALSSRLKSSLRITPFDQEEEEEEEEEVKKKKVGKERDDDGLESVVRGAQDKRKREISRTGSSGGSGSELTIMPPDQLAAAITEESRSPIDELMKLYYGCMQGVESYDVREKDDLTPMHSVVLGNIDEVAQDVLFDIIGSCPEIDDVLRLMGE

SEQ ID NO: 1965 - protein, 241 aa, Glycine max
MEKLNFVKNGVSKLPPGFRFQPTDEELVFQYLKCKVFSYPLPASIIPEINVCKYDPWDLPGNCDLQERHFFSPKEAKYRNGNRMNRTTKCGYWKATGSDKRISSSTCNNGIVGVRKTLIFYEGKSPKGSRTHWVLHEYRLVSVETGAANSSHNNYVNEIGDWVLCRLSMKKRSLESDGSATHQKHRQNNTVQTTRPRLMFDFMMVGKTNSSTSSSCSSSSNIMEVSSNASDHEETSGYAHF

SEQ ID NO: 1966 - protein, 725 aa, Oryza sativa (japonica cultivar-group)
MEINSSGEEAVVKVRKPYTITKQRERWTEAEHNRFLEALKLYGRAWQRIEEHVGTKTAVQIRSHAQKFFTKLEKEAINNGTSPGQAHDIDIPPPRPKRKPNSPYPRKSCLSSETSTREVQNDKATISNMTNNSTAQMAGDAALEKLTYIQKLQRKEISEKGSCSEVLNLFREVPSASFSSVNKSSSNHGASRGLEPTKTEVKDVVILERDSISNGAGKDAKDINDQEMERLNGIHISSKPDHSHENCLDTSSQQFKPKSNSVETTYVDWSAAKASHYQMDRNGVTGFQATGTEGSHPDQTSDQMGGASGTMNQCIHPTLPVDPKFDGNAAAQPFPHNYAAFAPMMQCHCNQDAYRSFANMSSTFSSMLVSTLLSNPAIHAAARLAASYWPTVDGNTPDPNQENLSESAQGSHAGSPPNMASIVTATVAAASAWWATQGLLPLFPPPIAFPFVPAPSAPFSTADVQRAQEKDIDCPMDNAQKELQETRKQDNFEAMKVIVSSETDESGKGEVSLHTELKISPADKADTKPAAGAETSDVFGNKKKQDRSSCGSNTPSSSDIEADNAPENQEKANDKAKQASCSNSSAGDNNHRRFRSSASTSDSWKEVSEEGRLAFDALFSRERLPQSFSPPQVEGSKEISKEEEDEVTTVTVDLNKNAAIIDQELDTADEPRASFPNELSNLKLKSRRTGFKPYKRCSVEAKENRVPASDEVGTKRIRLESEAST

SEQ ID NO: 1967 - protein, 248 aa, Cleome spinosa
MGRGRVELKRIENKINRQVTFAKRRNGLLKKAYELSVLCDAEVALIIFSNRGKLYEFCSSSNMLKTLERYQKCSYGSIEVNNRPAKELENSYREYLKLKSRYEGLHRQQRNLLGEDLGPLNSKELEQLERQLDSSLKQVRSIKTQSMLDELSDLQNKEQMLLEANRALSMKLEEMVGARTHQFGGAWEGSEQNVSYGHQAQSQGLFQPLECNPTLQIGYNNPVCSEQMAATTQAPVQAGNGYIPGWML

SEQ ID NO: 1968 - protein, 163 aa, Oryza sativa (japonica cultivar-group)
MNHLLYRYWPNNKSRMYVLENTGDYVRTHDLQLGDSIVIGAKKAGDQQAATVPQVDEHISTLFPIFPIAQVDDYLSPMAPQVDISAFVPHADENHEIFDGILNSLPEIPVANVRYSDFFDPFDDGMDMANTLNANANQSASLHVTDDKSGHSLIPNPKSGPHM

SEQ ID NO: 1969 - protein, 545 aa, Zea mays
MPIKFALENMSTQASNRSYRYPDRTQLPYHNGNPMHVGGNGNYCVQQNHDDVNYISSDDGSQSSSSRVQDFQAQFCTLDSSSANCVYPAHSSTSSQSISGSPLSQQESHSDHAYGSSPSASCITQVPTWTLKDLENVMLGPDSDIGSPDSSFLLDTALHGNNWRELLGIQTGDLRQVIVACGKAVDENAVYMDALMSELREMVSVSGEPMQRLGAYMLEGLIARLSFTGHALYKSLKCKEPVATSSELLSYMHLLYEICPFFKFGYMSANGAIAEAVKGEDIIHIIDFQIAQGSQWMTMIQALASRPGRRPYLRITGIDDSNSAHARGGGLDMVGQRLHRMAQSCGLPFEFNAVPAASHEVVFEDLCLRSGEAIVVNFAYQLHHTPDESVGIENHRDRILRMVKSLSPKVVTLVEQEANTNTAPFFLRYMETLDYYTAMFEAIDVACPRDDKKRISTEQHCVARDIVNLIACEGAERIERHEPFGKWRARLVMAGFRPYPLSPVVNRTIKTLLDSYHSHYRLEERDGILYLGWKNRKLVVSSAWC

SEQ ID NO: 1970 - protein, 380 aa, Populus alba x Populus tremula
MCGGAIISGFIAPTTTARSSRRLTSGFEWLEPKKPFNNKHLKPVVADPEDDFEADLQEFKDESDVDEDYDVFADAKPFAFSASASEPAKKRGLPRGSTAVKSAGFSGLAKNSAKRKRKNQFRGIRQRPWGKWAAEIRDPRKGVRVWLGTFNTAEEAARAYDSEARRIRGKKAKVNFPDEAPCASARHPIKENSQKRLTKANLSQDFSYLSNPETDYNNMGFVEEKPQVSQFGIMNSIPVNGDSGVTPLTPSDNASMYFNSDKGSNSFDCDFGWGEQGAEILSVLAATPEVDESVFVEANPKKLKSYTEYAVPVEERNGKSLSEELLAFDNQLMNLQMPDLVGNWEASLDSFLNGDTTQDGTNAVDLWSFEDFPSMVGGVY

SEQ ID NO: 1971 - protein, 419 aa, Arabidopsis thaliana
MAFHHNHLSQDLSFNHFTDQHQPPPPQPPPPPPQQQQHFQEAPPPNWLNTALLRSSDNNNNFLNLHTATANTTTASSSDSPSSAAAAAAANQWLSRSSSFLQRNNNNNASIVGDGIDDVTGGADTMIQGEMKTGGGENKNDGGGATAADGVVSWQNARHKAEILSHPLYEQLLSAHVACLRIATPVDQLPRIDAQLAQSQHVVAKYSALGAAAQGLVGDDKELDQFMTHYVLLLCSFKEQLQQHVRVHAMEAVMACWEIEQSLQSLTGVSPGEGMGATMSDDEDEQVESDANMFDGGLDVLGFGPLIPTESERSLMERVRQELKHELKQGYKEKIVDIREEILRKRRAGKLPGDTTSVLKAWWQSHSKWPYPTEEDKARLVQETGLQLKQINNWFINQRKRNWHSNPSSSTVLKNKRKR

SEQ ID NO: 1972 - protein, 165 aa, Solanum tuberosum
MAEPASPGGGGGSHESGGDPSPQSNLREQDRYLPIANIGRIMKKALPANGKIAKDSKDTVQECVSEFISFITSEASDKCQKEKRKTINGDDLLSALATLGFEDYIEPLKVYLTRYREMEGDAKGSARVGDASVRKDVVGSQLGSNTQFMYEGSFAQGLDYGNSQL

SEQ ID NO: 1973 - protein, 141 aa, Desulfovibrio desulfuricans G20
MNVLLVDDEVAFVEALARRLTRKNMTVHTVHNGPEALDFLRKNPSVDAVVLDVVMPGPDGLKVQEIIRKEFPLVEVIMLSGNSTTAMAVQGMKQGAFDYLSKPCSTEELIEKLHEAKRRRDTYCEELAALKAGDIVLRRGD

SEQ ID NO: 1974 - protein, 85 aa, Selaginella moellendorffii
EVVSLSPKTLMESDRYICEICNQGFQRDQNLQMHRRRHKVPWKLLKRATPEVRKRVYVCPEPSCLHHDPCHALGDLVGIKKHFRR

SEQ ID NO: 1975 - protein, 224 aa, Nymphaea sp. EMK-2003
MGRGKIEIKRIENTTNRQVTFCKRRSGLLKKAYELSVLCDAEVALIVFSSRGRLYEYANNSVRGTIERYKKAYAESSSSGAVAETNAQYYQHEAHKLRQQISKIQQDNRQMLGEGVSEMSLRDLKSLENKLERSISKIRGKKNDLLNGEIQYMQNWNEDLQKENTFLRAKVCENERAQQQHISILAAGPAEYELPPAVPFQHINLMESSHHQYSHQERTALQLG

SEQ ID NO: 1976 - protein, 119 aa, Musa x paradisiaca
ACAEAVQPVNLKAADALVKQITLLTTSQGGAMRKVAGYFAEALARRIYRPQPHRGVGCSSQDSAALDNILHVHFYESSPYLKFAHFTANQAILEALRANSFKPAGLATLSPLTPELFAF

SEQ ID NO: 1977 - protein, 348 aa, Triticum aestivum
MIMGALCDFCGEQRPTIYCRSDAASLCLSCDRNVHSANTLSQRHMRTLLCDRCASQPAAVRCLEENTSLCQNCDWNGHAATSLAAGHLRQTINCYSGCPSSEELARIWSFDFDAPSAAAEPNCEEGISMMSINDSGVSNHCGVQQDSSLLDIANTSLMSDPPTVEKLKSEDEMNLRPLPTHQPAQSVSMAPKVPSVTDDDMFNDGRVYENFCVDDNDLTFENYEELFGTPHVQTEQLFDDAGIDSFFEMKEMPAADCDQQLNPVRPKCSNAVSADSSLCVPARQAISTISLSFSGLTGESNAGDHQDCEVSPLLLMGEQPWLPPGSEGSSAGGSRGSALSRYLGRDHA

SEQ ID NO: 1978 - protein, 204 aa, Berberis gilgiana
KRRNGLLKKAYELSVLCDAEVALIVFSARGRLYEYANNSVKTTIERYKKACSDSTNTGSVSEANAQFYQQEATRMRQQIGNLQNANRHLLGQDLSSVSVKDLKQMETRLEKGISRIRSKKNELLFAEIEYMQKREIDLQNDNMYLRAKIAENERAQQQMNLMPGNEYETITSAPYDSRNFLQVNLLPESNNQYSRSDQTALQLG

SEQ ID NO: 1979 - protein, 407 aa, Zea mays
MASLCDFCGKQRSMIYCRSDAASLCLSCDRNVHSANALSRRHTRTLLCDRCGSQPASVRCLEDNASLCQNCDWNGHDAESGASGHKRQAINCYSGCPSSAELSRIWSFITDIPTVAAEPDYEDGLSMMTIDGSDVTNRHDTSDDKRLLEIANTTLMSDPPSADKLKSPTGSSSGDGFDVMTLATDQPAGPVSATPKVPNARDDDKFNDGMYEDLCVDDADLTFEDYEELFGTSHIRTEELFDDAGIDGYFELKETPPFYFNEQPKAMQIECGNVVSADCAMSNPGARADSSLCIPVRQVRSSISHSLSGLTGESSAGDHHDCGVSPMLLMGEPPWHSPGGPEGSVAGGSRDSALTRYKEKKKRRKFDKKIRYASRKARADVRKRVKGRFIKAGEAYDYDPLSQTRSY

SEQ ID NO: 1980 - protein, 202 aa, Akebia quinata
RRNGLLKKAYELSVLCDAEVALVVFSNRGRLYEYANNSVKTTIERYKKACIDSSNSGSVSEANAQFYQQESLKLRQQIGNLQNLNRHLMGEALGSMSIKELKQLETRIEKGISRIRSKKNELLFAEIEYMQKREIDLQNDNMYLRAKIAENERAGQHMSLMPGNEYEVMSSAPFDSRNFLQVNLLEPNNHYSHTDQIALQLG

SEQ ID NO: 1981 - protein, 267 aa, Zea mays
MDDGDLDFSNPDTYLCPALGTDPPSSCSMDSYFDEILKDTEHLACTHTHTCNPPVHDLSHTHTCVHVHTKIVAASPGDAESPSENNSNGNAASKKRPSGNRAAVRKYREKKKAHTASLEEEVVHLRALNQQLMKKLQSHAALEAEAARLRCLLVDIRGRIEGEIGAFPYQRPPAVKNVDLLSSVDQESLLGSAAAQVASSCDFRCNHQMYCTPGMQGAVGGQVLGQGACDVSSFQCVGSTRSASTKLPVCGGMDAVPAACLPNVPNK

SEQ ID NO: 1982 - protein, 700 aa, Zea mays
  misc_feature (139)..(139): Xaa can be any naturally occurring amino acid
MEVNSSGEETVIKVRKPYTITKQRERWTEAEHKRFLEALKLYGRAWQRIEEHVGTKTAVQIRSHAQKFFTKLEKEAINNGTSPGQAHDIDIPPPRPKRKANSPYPRKSGLSSETPTKELPSDKSTKPNMPLSNENVLMXKFQRKELSGKESCSEVLNLFRDAPSPSFSSVNKSSSNHGAPIEASKTKIRDMTIMENSSLNPNMQEDVKEINDQEMERLNGTQISSKCEHSHEGYLDISMQQMKLKPESVETTYVDKQTARASHSLAERTGTTSIPVTATEETHSVLTSDQVGINGSMNLSIHPMFPADPKFDSSATPQPFPHNYAAFAPMMQCNCNQDTHRSLVNMSSTFSSMLVSTLLSNPAIHAAARLAASYWPAAEGNTPIDPNQENLADGVQGRSIGSPPSMASIVAATVAAASAWWATQGLLPFFAPPMAFSFVPAPSAAFPTVDVPRPSEKDRDCPAENAQKECQEARKQGQFEGFRVAASSEYDGSGKGEVSVHTELKISPVQNADATSAAGADTTDAFMNKKKQDRSSCGSNTPSSSDVDVDNVPEKEGNGNEKAKQASCSNSSAGDTNHRRFRSSGSTSDSWKEVSEEGRLAFHALFSREKLPQSFSPPQAEGSKEVGKEEEDEVTTVAVFKYRTRRRYEVLLASGPAFGWRYGRRSSLVYRRPQLQVTKRTAVERFPSISVSFCRIWRWR

SEQ ID NO: 1983 - protein, 204 aa, Capsella rubella
MATIEESSDLEAMQKHLFEDFLVSDGFLGDFDFDASFVSGLWCIEPQVPKQEPDSPVLDPDSFVNEFLQVEAKSSPELNTSSSSTYETDQCVKKAERFEEEVETRHYRGVRRRPWGKFAAEIRDPAKKGSRIWLGTFESDVDAARAYDCAAFKLRGRKAVLNFPLDAGKYEAPANSGRKRKRSDAQEELQRTHSNSSSSSCDAF

SEQ ID NO: 1984 - protein, 588 aa, Lycopersicon esculentum
MKRDRDRDREREKRAFSNGAVSSGKSKIWEEDEEEKPDAGMDELLAVLGYKVKSSDMADVAQKLEQLEMAMGTTMEDGITHLSTDTVHKNPSDMAGWVQSMLSSISTNFDMCNQENDVLVSGCGSSSSIIDFSQNHRTSTISDDDLRAIPGGAVFNSDSNKRHRSTTSSFSTTSSSMVTDSSATRPVVLVDSQETGVRLVHTLMACAEAVQQENLTLADQLVRHIGILAVSQSGAMRKVATYFAEALARRIYKIYPQDSMESSYTDVLQMHFYETCPYLKFAHFTANQAILEAFTGCNKVHVIDFSLKQGMQWPALMQALALRPGGPPAFRLTGIGPPQPDNTDALQQVGWKLAQLAETIGVEFEFRGFVANSLADLDATILDIRPSETEAVAINSVFELHRLLSRPGAIEKVLNSIKQINPKIVTLVEQEANHNAGVFIDRFNEALHYYSTMFDSLESSGSSSSASPTGILPQPPVNNQDLVMSEVYLGRQICNVVACEGSDRVERHETLNQWRVRMNSSGFDPVHLGSNAFKQASMLLALFAGGDGYRVEENDGCLMLGWHTRPLIATSAWKLLPDSGTGAGEVEL

SEQ ID NO: 1985 - protein, 187 aa, Glycine max
TRPVRVHAMEAVMACWELEQSLQSLTGVSPGEGTGATMSDDENDQVDSDANLFDCSFDGADSMGFGPLVPTESERSLMERVRQELKHELKQGYKEKIVDIREEILRKRRAGKLPGDTTSVLKAWWQSHSKWPYPTEEDKARLVQETGLQLKQINNWFINQRKRNWHSNPSTSTALKSKRKRSNAGDN

SEQ ID NO: 1986 - protein, 264 aa, Dianthus caryophyllus
MLNFGATARNGVVSTRRWKSDTCIDLGPSDVRSEAHVLAVDDSLIDRKVIERLLKTTSCKVTVVDSGMRALEFLGLDAEQRTSVVDGLKIDLIITDYCMPGMTGYELLKKIKESSTFKETPVVIMSSENVIARIDRCLEEGAEDFILKPVKLSDVKRLRDYMTNKYDKSNSRVISGTNKRKQMDGSDQSYDSSSSSSSSSSLSLSPISTQSQPLISPSSSTPSSPCGPLDSNSMPSSPSGPSDTPSRRRRMAVDVDDDQTAVMP

SEQ ID NO: 1987 - protein, 139 aa, Oryza sativa (japonica cultivar-group)
MTKYKGVRQRHWGSWVAEIRHPLLKTRIWLGTYGTAEDAARAYDEAARLMSGPAARTNFPLSSSGGNARSCLSPTLRARLEKCCGAGSSAQAQQGAVAGQDNDDAAAAAAAMGVDDGDEYVEEMIQELTFYGSIEIVQP

SEQ ID NO: 1988 - protein, 238 aa, Oryza sativa
  misc_feature (218)..(218): Xaa can be any naturally occurring amino acid
MARGKVQLRRIENPVHRQVTFCKRRAGLLKKARELSILCEADIGIIIFSAHGKLYDLATTGTMEELIERYKSASGEQANACGDQRMDPKQEAMVLKQEINLLQKGLRYIYGNRANEHMTVEELNALERYLEIWMYNIRSAKMQIMIQEIQALKSKEGMLKAANEILQEKIVEQNGLIDVGMMVADQQNGHFSTVPLLEEITNPLTILSGYSTCRGSEXGLFLLTLIMAWGILVFITSV

SEQ ID NO: 1989 - protein, 252 aa, Ginkgo biloba
MGRGRVQLRRIENKINRQVTFSKRRNGLLKKAYELSVLCDAEVALIVFSTRGKLYEFASSSMNKTLERYEKCSYAVQDTNVSNREAQNWHQEVTKLKSKVELLQQSQRHLLGEDLGPLSVKELQQLERQLEIALNHVRSRKSQVMMDLIDELRKKERLLQEVNKSLHKKLSESEGRNATHDMRHPTDDNGPWNPSVNGGYALPSTQQNTNLHPVDCEPTLQIGYQSVPRESIEPPQEQTHNQPQDNYTGWWV

SEQ ID NO: 1990 - protein, 129 aa, Brassica napus
  misc_feature (44)..(45): Xaa can be any naturally occurring amino acid
  misc_feature (118)..(118): Xaa can be any naturally occurring amino acid
  misc_feature (126)..(126): Xaa can be any naturally occurring amino acid
LQGQAALEAEVTRLKCLLVDIRGRIEGEIGAFPYQKPVAPNAHXXYTMQPCNNMPCGVDNNLYCFQDGNSGEGALMNGQGLNGCEFDQLQCLDGDQNLAGCSNGNGTFGVNASGVANXRKRGTPAXKAV

SEQ ID NO: 1991 - protein, 189 aa, Arabidopsis thaliana
MVHSRKFRGVRQRQWGSWVSEIRHPLLKRRVWLGTFETAEAAARAYDQAALLMNGQNAKTNFPVVKSEEGSDHVKDVNSPLMSPKSLSELLNAKLRKSCKDLTPSLTCLRLDTDSSHIGVWQKRAGSKTSPTWVMRLELGNVVNESAVDLGLTTMNKQNVEKEEEEEEAIISDEDQLAMEMIEELLNWS

SEQ ID NO: 1992 - protein, 446 aa, Lycopersicon peruvianum
RMSVDVGAPSPRSIQMDEQVNPGEEYAPKIRKPYTISKQRERWSEEEHKKFLEALKLHGRAWRRIEEHVGTKTAVQIRSHAQKFFSKVVRESSNGDASSVKSIEIPPPRPKRKPMHPYPRKMATPLKSGTLASEKLNRSGSPDLCLSEPENQSPTSVLSTLGSDAFGTVDSTKPSEQSSPVSSAVAENSGDLVLSEPFDFAVEESRSSPARAYATSNPANQACVKLELFPEDNDFVKEGSDEASSTQCLKLFGKTVLVTDAHMPPTDETLTRSSFPAKYLPWDSECPRSTFSIVPPTASYYFPTPNGSPGPNQSGAATHLPWGSSCAVPCTQVHSPIPMKGRPLFNDRDLEGKEAQKEGSSTGSNAESVDAELSGDKNMEIEAQSSRNVVEESVRASVPSLFERRANSTKRVKGFVPYKRCLAERGMSSSTLTGEEREEQRTRLCL

SEQ ID NO: 1993 - protein, 551 aa, Pinus taeda
MSYVKMLNSRAQPISTGLSIPSLSVGHTDVNGIQISFSQYPMDSEKMPQMQQQTNNVDFMDLDYKPPLCNVSQADGVMALTERGSSNNFQGPTGLMRYHSAPSSFFSSLGEEENNNIISEYFSGNSSNPLQSNTKPLQQNQPSILSFHLRENEPAKHLGERNEISEKEMHASSLPSKEVQGNVSREDLGKHHPLDAILENVPDVSQDSFGTSQMSLMSQVQVSEPSGQHIDSSYQMNSVCCDTLDQSGGRMGNAYSSTSKNTLIRHSSSPAGLLSELVAEGRGTFESGFMEGTVRNSIGVGNSCGDIIIPNRVQRQMNRLQQNSSPGLLSQLSVDMSVPEMVDRLNMAMVGSSAENQAGSSSDDSSLGSGNAGQGYISNFSVKSWDDEAMTPGNFAGMQNGANFTARKRAKELDMKLMQGLNNSDHQKVEGGIRGASALTNHPYNLPRSTSSELAMEEFLQDAVPCKVRAKRGCATHPRSIAERVRRTRISERMRKLQELVPNSDKQTVNIADMLDEAVEYVKSLQKQVQELAENRAKCTCTHNPDCAYKT

SEQ ID NO: 1994 - protein, 533 aa, Physcomitrella patens
MMAFNNLSHDVSLQQFPELWESSRFSQRHDTLDADQHTQGFDDTQFPKEPLEPNTNLHQVAMEIQPNATIIGDESSRGRNPVVNESDDREDDNHLLGTEDGIVKNGRTWLNSALLREQNQASEDRSGYGDHNAAERWCPVCSASGSQSCMCGMPMHAGDSSTISFPNQSTYTHWLSMQGANMLASQHRTGGEVDAKAAGFTVSPQSTKMATELNLSPAGHGRDNHALFTDPRHSVAQGGSRYAEDYERTEHQTDWEGATQKMEWEQARDKFLIVAHPLYPDLLNAHASCLRVGTPVDQLPHIEAQLTQARHVTSKYSVLHPDHLEITEDEKTELDQFMAQYIMLLCSFKDHLQQHVYYDVTEAMMSCWELEQALHNLTGVSAGESTGATMSEEDEDYDSDYGAYDAHMDPQDSGGFGPLVPTESERTLMERVRQELKYELKQGYRARIVDVREEILRKRRAGKLPEGTTTVLKAWWQAHSKWPYPTEDEKERRIQETGLELKQVNNWFINQRKRNWHSNPLSSSSELKSKRKK

SEQ ID NO: 1995 - protein, 446 aa, Lycopersicon peruvianum
RMSVDVGAPSPRSIQMDEQVNPGEEYAPKIRKPYTISKQRERWSEEEHKKFLEALKLHGRAWRRIEEHVGTKTAVQIRSHAQKFFSKVVRESSNGDASSVKSIEIPPPRPKRKPMHPYPRKMATPLKSGTLASEKLNRSGSPDLCLSEPENQSPTSVLSTLGSDAFGTVDSTKPSEQSSPVSSAVAENSGDLVLSEPFDFAVEESRSSPARAYATSNPANQACVKLELFPEDNDFVKEGSDEASSTQCLKLFGKTVLVTDAHMPPTDETLTRSSFPAKYLPWDSECPRSTFSIVPPTPSYYFPTPNGSPGPNQSGAATHLPWGSSCAVPCTQVHSPIPMKGRPLFNDRDLEGKETQKEGSSTGSNAESVDAELSGEKNMEIEAQSSRNVVEESVRASVPSLFERRANSTKRVKGFVPYKRCLAERGMSSSTLTGEEREEQRTRLCL

SEQ ID NO: 1996 - protein, 405 aa, Zea mays
MVPLCGFCGKQRSMIYCRSDAASLCLSCDRSVHSANALSRRHRRTLLCDRCGLQPASVRCLEDNTSLCQNCDWNGHDAASGASGHKRQAINCYSGCPSSAELSRIWSFIIDIPTVAAEPNCEDGLSMMTIDDSDVTNHHGASDDKRLLEIANTALMSDPPSPDKLKPLIGSSSGDGFDVLPLATDQPAGPVSATPKVPYARDDNKFNDGMYEDLCVDDADLTFENYEELFGTSHIRIEELFDDAGIDSYFEMKETPPFDFNEPKIVQLQCSDVVPADCAMSNTGERADSSLCIPVRQVRSSISHPLSGLTGESSAGDHQDCGVSPILLMGEPPWYSPGPEGSLAGGSRDSALTRYKEKKKKRMFDKKIRYASRKARADVRKRVKGRFIKAGEAYDYDPLSQTRSY

SEQ ID NO: 1997 - protein, 204 aa, Helleborus orientalis
KRRNGLLKKAYELSVLCDAEVALIVFSTRGRLYEYSNNSVKKTIERYKKASTDSSGSGSVSEVNAQYYQQEASKLRNQIATLQNSNRNLLGEQLSNLNIRELKQIEKKIETGINKIQSKKNELLFAEIEYMQKREADLQNDNMYLRAKISENERTQQHMSLMPGTNDYEVISSGAFDSRNFLQVNLLGSNDTYSRSDQTALQLG

SEQ ID NO: 1998 - protein, 216 aa, Helleborus orientalis
IENTTNRQVTFCKHRNGLLKKAYELSVLCDAEVALIVFSSRGRLYEYSNNSVKKTIERYKKASTDSSNSGSASEANAQYYQQEAAKLRNQIAALQNSNRNLLGEQLSNLSIRELKQIEKKIETGINKIRSKKNELLFAEIEYMQKREVDLQNDNMFLRAKISENERTQQHMSLMPGTNNYEVISSGPFDSRNFLQVNLLESNNNYSRSDQTALQLG

SEQ ID NO: 1999 - protein, 294 aa, Oryza sativa (japonica cultivar-group)
MTSNNSTNEELGGGGRKAADKPSGGGGAAAAVASSRHWSASTESRIVRVSRVFGGKDRHSKVRTVKGLRDRRVRLSVPTAIQLYDLQDRLGLSQPSKVVDWLINAAQAEIDKLPPLQFPPHDHDLVAAAASSMAPPPFANGGDGHHGASASSMLEDGDKAAGGGGMKAFMSLSNSLGLLNAATMPATLAAHHHHHHHAAAYYAAAESWGNGGNGGHHHDVSHGVSPSAHNSPFPSLLSLAPGSHHQFVFYSPEGGGFAVKEAAAEQFPVDSLDHSQGQLTLSSARSFLHSGSQG

SEQ ID NO: 2000 - protein, 523 aa, Arabidopsis thaliana
MNNPTLFSPKSPHFFQPLLPGFKSHINIPVKFFSKYIKGKHEGKTVKLRSDSSKRTWKVKIEGHTLTDGWKEFVEAHDLRISDFVIFKHKGDMFFDVTALGSSCCEVQYAPSCSHGENEESDEIGESSRKEKEIEENIETEPDQFSSDLTCFSQSVTTSNLMRDSVGVPRDFAKRYGFNIGRHEIVLMNEEGKPWESEVISYKSGKVIVAGGWKSLCTESKLEVGDSCTFKLLHNAKMPVFRLCSKLPKAGAEARPLKRARVQRWSQESRSKHDVREKIAEEGEPSRRNRTSNKSTGDQGKLQQTQSCFIFDHVAKIGTYERIHWLSLPRNFVRSDGLIKGSNKIVLMNEGARTWTLILKFRDSRRSFYSRGGWRSFCRENGLKPGDSVTFKLESSNTKTPLLLFSIAESKSASTKDRTRFLTLTVTPSSIRSSRLYLSKKFISVNKMERAGGKKITLLDKNGEEWPVTLLMDKRYTRMVLGSGLREFCNAIGVKAYESVVLELVWEETTTLPMFKFCSKIKT

SEQ ID NO: 2001 - protein, 214 aa, Aquilegia alpina
IENTTNRQVTFCKRRNGLLKKAYELSVLCEAEVALIVFSNRGRLYEYANNSVRKTIDRYKKTCGEGSSTLTVSEANLLFYQQESSKMKQQIEILQNSNRHLMGEALSCLSIKELKQLESRLEKGISRIRSKKNEMLLAEIEFMQKREIELHNDNIYLREQITANERAQQHMNSLPGNVYEAITSAPYNSRDFLQVNLRESKPNQYCDSTALQLC

SEQ ID NO: 2002 - protein, 203 aa, Aquilegia alpina
KRRNGLLKKAYELSVLCEAEVALIVFSSRGRLYEYSNNSVKKTIERYKKASTDSNNSGSVSEANAQFYQQEATKLRNQIASLQNHNRNLLGESLSNLNIRELKQIEKKIEGGISKIRAKKNELLFAEIEYMQKRELDLQTDNKYLRAMIAANERAPEHMNLMPANEYHALSSAPFDSRNFMPANLLDHNNNYSRSDQTTLQLG

SEQ ID NO: 2003 - protein, 203 aa, Clematis integrifolia
KRRNGLLKKAYELSVLCDAEVALIVFSNRGRLYEYANNSVRKTIDRYKKTCSDPQTALTVSEANTMFYQQETTKMKQQIEILQNSNRHLMGEALSCLSIKELKQLESRLEKGLGRIRSKKNEMLLSEIEYMQKREIDLHNDNLYLRAKISDNEKAQHNMNVLPGNVYEAMTSAPYDARNFLQVNLPDTKEHPYCSGSTALQLC

SEQ ID NO: 2004 - protein, 334 aa, Glycine max
MGRPPCCDKEGVKKGPWTPEEDIILVSYIQEHGPGNWRAVPAKTGLSRCSKSCRLRWTNYLRPGIKRGNFTEQEEKMIIHLQDLLGNRWAAIASYLPQRTDNDIKNYWNTHLRKKLKKMQVGCEGGSFGEGFSASRQIPRGQWERRLQTDIQMAKRALSEALSPEKPSCNLSASNSNPSDSSSSFSSTKPTTTQTVCYASSADNIARMLKGWMKNPPKSSRTNSSSVTQNSFNNFAAAGADTASSIGAKGPPSSAELSENNFESLFDFDQSLESSNSDEFSRSLSPEATVLQDESKPDVIGAEIMPFSLLEKWLLDEAGCQEKLVGCGDDAKFF

SEQ ID NO: 2005 - protein, 381 aa, Arabidopsis thaliana
  misc_feature (293)..(293): Xaa can be any naturally occurring amino acid
  misc_feature (310)..(310): Xaa can be any naturally occurring amino acid
MSFRSIVRDVRDSIGSLSRRSFDFKLSSLNKEGGKSRGSVQDSHEEQLVVTIQETPWANIPPELLRDVIKRLEESESVWPARRHVVACASVCRSWRDMCKEIVQSPELSGKITFPVSLKQPGPRDATMQCFIKRDKSNLTYHLYLCLSPALLVENGKFLLSAKRIRRTTYTEYVISMHADTISRSSNTYIGKIRSNFLGTKFIIYDTQPAYNSNIARAVQPVGLSRRFYSKRVSPKVPSGSYKIAQVSYELNVLGTRGPRRMHCAMNSIPASSLAEGGTVPGQPDIIVPRSIXSHESFRSITSSSSQKNXYDYSNDFSSARFSDILGPLSEDQEVVLEEGKERNSPPLVLKNKPPRWHEQLQCWCLNFRGRVTVASVKNFQ

SEQ ID NO: 2006 - protein, 259 aa, Brassica napus
STHASDLATDTVHYNPAELYSWLDNMLTELNPPAASGSSGVNQILPSPEVNNNSFFAGGGDYDLKAIPGSAICRGSNQFAVDSLNNKRLKPCSSPDSMVTSPSPAGVIGTTVTTTTASESTRPLILVDSQDNGVRLVHALMACAEAVQSSNLTLAEALVKQIGFLAVSQAGAMRKVATYFAEALARRIYRLSPPQTQIDHSLSDTLQMHFYETCPYLKFAHFTANQAILEAFEGKKRVHVIDFSMNQGLQWPALMQALA

SEQ ID NO: 2007 - protein, 396 aa, Lycopersicon esculentum
MEREIANKGLSLDPQRNQQQHYHLNQNQNQNQDSVGKEEEENQQQSENEPQLYLHPHNQQQQPFFNQHHLIYGRLDSQQLLPPQPTPKKRSYLPSTSSLGQNVEHAAALRGKMAETSRLGIRNTVGEIVEVQGGHIVRSTGRKDRHSKVCTAKGPRDRRVRLSAHTAIQFYDVQDRLGYDRPSKAVDWLIKKAKPAIDELAELPAWKPTIGTASAAAATNTNLEQEQAQKQQEDNNFAFQQGNVSLFDNVAGPSSKRAIESNTASFLPPSLESDAIADTIKSFFPMGSSTSANSSAMQFHSFQEPHMLSRANSQNQDLSLSLQFQDPILLHHQNQQAQHHNQTNHKGTKSKCRVKHQPTLEETPHLVLTPLAGLCIRDFVLGVTVEKLALVVVVEQ

SEQ ID NO: 2008 - protein, 126 aa, Brassica napus
  misc_feature (102)..(102): Xaa can be any naturally occurring amino acid
  misc_feature (113)..(113): Xaa can be any naturally occurring amino acid
  misc_feature (119)..(119): Xaa can be any naturally occurring amino acid
  misc_feature (122)..(122): Xaa can be any naturally occurring amino acid
MGYMCDFCGEQRSMVYCRSDAACLCLSCDRSVHSANALSKRHSRTLVCERCNAQPATVRCVEERVSLCQNCDWSGHNNNNNNSSSSSSNNHKRQTISCYSGXPSSSELASIWXFWLELXGQXGWKR

SEQ ID NO: 2009 - protein, 174 aa, Zea mays
MGRHSCCYKQKLRKGLWSPEEDEKLMNHITKHGHGCWSTVPKLAGTTIKIKIKSCTLCSTFSIVHLHCFLLLLQGLQRCGKSCRLRWINYLRPDLKRGAFSEEEEDLIVELHAVLGNRWSQIATRLPGRTDNEIKNLWNSSIKKKLRQKGIDPHTPQPLLVEVERSAAPTTSTE

SEQ ID NO: 2010 - protein, 144 aa, Saccharomyces cerevisiae [sequence omitted]

SEQ ID NO: 2011 - protein, 243 aa, Ginkgo biloba
MGRGRVELKRIENKINRQVTFSKRRNGLLKKAYELSVLCDAEVALIIFSSRGKVYEFGSAGMTKTLERYQKCSYVLQDVNVSDREAQNWHQEVGKLKAKVELLQRSQRHLLGEDLGPLSVKELQQLERQLEVALTHVRSRKTQVMLDLMDELRKKERLLQEVNKSLRKKLSEAEEQRAFSAMQDPGSWDSNAVANNAYAMPPNQSNAVDCEPTLQIGYQYAPPETSMPRADQTENNYMQGWMV

SEQ ID NO: 2012 - protein, 152 aa, Brassica napus
  misc_feature (55)..(55): Xaa can be any naturally occurring amino acid
  misc_feature (128)..(128): Xaa can be any naturally occurring amino acid
  misc_feature (146)..(147): Xaa can be any naturally occurring amino acid
  misc_feature (151)..(151): Xaa can be any naturally occurring amino acid
MSGEGSKDHQDEDETTLPGFRFHPTDEELLEYYLRRKVENKPIKLELIKQVDIYXKYDPWDLPRVSSVGEKEWYFFCMRGRKYRNSVRPNRVTSSGFWKATGIDKPVYSSLDCVGLKKSLVYYLGSAXGKGTKTDWMMHEFRLPSXXKPNXP

SEQ ID NO: 2013 - protein, 131 aa, Brassica napus
MDPPLVNDSSFSPANPSSYTLSEIWPFPVNDAVRSGLRLAVNSTPSDKDVSTAAAAAAAAEESTVTDLTAGWGGRKARALNSEEDESSKMVSLSSSGNEVKDSGEKKRKLCGSESGNGDGSMKPEGETSQV

SEQ ID NO: 2014 - protein, 233 aa, Oryza sativa (japonica cultivar-group)
MAGLGFDETELRLGLPGAGELAARSSGKRGFAETIDLKLKLQPAAPAAVSGEEGAQEDKEDADAAAAAADEKMSMKRSASQSSVVTAEPDPDKPRAPKAQVVGWPPVRSFRKNVLAEKCKAAALVKVSMDGAPYLRKIDVAMYKSYPELSMAFQNMFTSFTIGKCGSHQQLKESNKLRDDLEYVPTYEDKDGDWMLVGDVPWEMFVESCKRLRIMKGSEAIGLAPRAVEKCKS

SEQ ID NO: 2015 - protein, 336 aa, Arabidopsis thaliana
MVRNKEGIFAPKEKKVVVLWDLDNKPPRGPPYEAATALRKVAEKLGRVVEISAYANRHAFIHLPHWVVEERRERRNLDFMERKGEVTPIDPYICGVCGRKCKTNLDLKKHFKQLHERERQKKVNRMRSLKGKKRQKFKERYVSGNEKYNEAARSLLTPKVGYGLEAELRRAGVYVKTVEDKPQAADWAVKRQIQHSMTRGIDWLVLVSDDKDFSDMLRKAREADLGTLVVSDMDRALGRHADLWVPWSGVEKGEIGEKDLIPGKRPRFEEDEVGFGGNDELFSLSYDEDEKAEMTVESDGFGRFNVSAFSEDEWVEDEGDFVLSDSSDDDSDDELF

SEQ ID NO: 2016 - protein, 417 aa, Gossypium raimondii
MKESDKSLDPQLWHACAGPMVQIPPLNSKVFYFPQGHAEHSLAAVDFPSSPPVPALVLCRVASLKFMADTETDEVYAKILLMPLPNTELDLEHVAVFGSDNAEKPASFAKTLTQSDANNGGGFSVPRYCAETIFPPLDYTEDPPVQTVVAVDVHGETWKFRHIYRGTPRRHLLTTGWSTFVNHKKLVAGDSIVFLRSENGGLCVGIRRAKRGTGNGPEAGSPFLSFLREDESKMMMMNRNGDWRGKGKLKAEAVLQAATLAASGQPFEVVYYPRASTPEFCVKASSVKAAMRVPWCCGMRFKMAFETEDSSRISWFMGTVSSVQVVDPIRWPNSPWRLFQLEELSTQVPQGLAWDNIGGPSIPPYNRLTAAQFEAFFHPPGANCSSQIGYSNDVVSDEMNGAVHSQNVNGYFPGWML

SEQ ID NO: 2017 - protein, 505 aa, Mesorhizobium sp. BNC1
MPDTVLIVDDDPVQLRLLDAAVRRLGYAPVLADGGEAALRILAEVRPEELRAVILDLMMPGMNGIEVMETMRKRGIDMPVIVQTATGGVETAVAAMRAGAFDFVVKPVSPERLAAALKNALKVEALEGQQRRKREKAPDKFSFRHIVTRSPAMEKVLRLAQRAAASDIPILIEGESGVGKELIARAVRNESARRGKPFVTVNCGAIPDNLVESILFGHEKGAFTGATEKHSGKFVEANGGTLFLDEIGELPLDVQVKLLRAVQEGEVDPVGRRGTVKVDIRLISATNRDLLQRVREGRFREDLYYRLGVFPITVPPLRERRDDIPLLVQYFIAQFGDATTGRNISGISSDAIKLLSAYDWPGNVRQLENAVFRAMVLCDGTVLTAAEFPQIRAQVEGIDEKLLADEIKPAHQESAPPPQPDKASQQEMQPLHPALLPVIGEDGNVRPLEEMEREMIQFAIEHYDGRMSEVARRLGIGRSTLYRKLKEMGIEPPEGGGKKTESPGG

SEQ ID NO: 2018 - protein, 203 aa, Clematis integrifolia
KRRNGLLKKAYELSVLCDAEVALIVFSSRGRLYEYSNNSVRKTIERYKKASSDTSNTGSVSEANAQFYQNEAGKLRNQIASLQNNNKNLLGESLSNLSIRELKQLEKKIEGGITKIRSKKNELLFAEIEYMQKREIDLQNDNLYLRAKIADNERTQQQMNLMPGNEYEVISSAPFDSRNFLPVNLLEPNNSYSHCDQTTLQLG

SEQ ID NO: 2019 - protein, 226 aa, Arabidopsis thaliana
MSSSDSVNNGVNSRMYFRNPSFSNVILNDNWSDLPLSVDDSQDMAIYNTLRDAVSSGWTPSVPPVTSPAEEDKPPATKASGSHAPRQKGMQYRGVRRRPWGKFAAEIRDPKKNGARVWLGTYETPEDAAVAYDRAAFQLRGSKAKLNFPHLIGSCKYEPVRIRPRRRSPEPSVSDQLTSEQKRESHVDDGESSLVVPELDFTVDQFYFDGSLLMDQSECSYSDNRI

SEQ ID NO: 2020 - protein, 496 aa, Brucella suis 1330
MATRILIADDDPIQRRNLEAIVMRMGYRTILADGGVSALGFISQRKDIVLVLLDLTMPDMDGLTVLSRMRAAGVAVPVIVLVHSDDMHRVAQAIRLGAADFMIKPVIFERVQVSVANVLKLDALTHEIQRARSSPRVHLSLSEMVAKSPEMERVMVLARRAAALDAPLLVEGETGSGRQTLARAICGGGSRWRGPFVSLDCRGLTMENADDILFGTAKFCPDDPIVSAGKLAEADGGVLFLDEVGALPHHTQLRLFTAMQSGQYESNGSRVTSNARIMTSSSQPLVDFVHMGRFHAGLYHLLGSFSIAMPPLRERVEDISILVHQFAVRFASEERLSHITGIAPHLLERLKAYQWPGNVRELKNAVYRAVLLCDKSELTVEDFAQLNLGAAGFAGAQAMWQKPAAPLSVGRAGTAFSGIDADGEVRTLAAAEEEMIRFAIAHYDGQISEVARRLGIGRTTLYRKLKEYGIDVASISGKGKESDLENESCSWGRAAI

SEQ ID NO: 2021 - protein, 182 aa, Triticum aestivum
MSDEAASPPGGGGGGGGGGSDDGGGGGGFGGVREQDRFLPIANISRIMKKAIPANGKIAKDAKETVQECVSEFISFITSEASDKCQREKRKTINGDDLLWAMATLGFEEYIEPLKVYLQKYRETEGDSKLAGKSGDVSVKKDALGPHGGASGTSAQGMGQQVAYNPGMVYMQPQYHNGDISN

SEQ ID NO: 2022 - protein, 216 aa, Ranunculus ficaria
IENTTNRQVTFCKRRNGLLKKAYELSVLCEAEVALIVFSNRGRLYEYSNNSVKKTIERYKKHSTDSSNTGSVSEANAQFYQQEANKLRNQIATLQNSNKNLLGESLSNLSVRELKAIEKKIEGGIAKIRSKKNELLFAEIEYMQKREIDLQNDNMFLRAKIAENERTQQQHMSLMPVNDYEVISSAPYDSRNFLPVNLLDSNHNYSRNDQTTLQLG

SEQ ID NO: 2023 - protein, 203 aa, Ranunculus ficaria
KRRNGLLKKAYELSVLCEAEVALIVFSNRGRLYEYANNSVRKTIDRYKKQCSDASTALTVSEANSLFYQQESSKMKQQIDILQNSNRHLMGEALSCLSIKELKQLESRLEKGLSRIRSKKNEMLLAEIEYVQKREIDLHNDNVYLRQKISENERAQQHMNSLPGNAYEAMTSAPYDARNFLQVNLSDNKDNHYGSSSTALQLC

SEQ ID NO: 2024 - protein, 200 aa, Saxifraga careyana
KRRNGLLKKAYELSVLCDAEVALIVFSTRGRLYEYANNNIRSTIERYKKANSDSLNTGDVVETNTQFYQHESVKLRQQIQMLQNSNRNIMGESLSSLTLKELKQLENRLERGITRIRSKKHEMLLAEIEYMQKREIDLENESIYLRAKIGEAESIEQANVAAANDLHAIQAYVAHNFFQPSLLDAEPSFGYPNKKSPRLG

SEQ ID NO: 2025 - protein, 542 aa, Glycine max
  misc_feature (407)..(407): Xaa can be any naturally occurring amino acid
MQTSQKHPSSAGVHFYHQPVQGIYQMLQSNLCHDSSSQGTSVSFETCKEQYFTLESCPAPTTCFVDCDDSPSYASVSSKRTPFSPQGSQSCYSDHQQSSDNTYGSPISGLSSVDDGHELKHKLRELEISLLGPEQSDSCGCCVVKGGLQGSSQLAKHNWDQIAENVAQFDLKGVLRVCAQAVSDDDVPTARGWMDNVLGKMVSVSGDPIQRLGAYLLEGLRARLESSGNLIYKSLNCEQPTSKELMSYMHILYQICPYWKFAYISANAVIEEAMANESRIHIIDFQIAQGTQWHLLIQALAHRPGGPPSLRVTGVDDSQSIHARGGGLQIVGERLSDFARSCGVPFEFRSAAISGCEVVRGNIEVLPGEALAVSFPYVLHHMPDESVSTENHRDRLLRLVKRLSPKXVTIVEQESNTNTSPFFHRFVETLDYYTAMFESIDVACPRDDKKRISAEQHCVARDIVNMIACEGVERVERHELLGKWRSRLSMAGFKQCQLSSSVMVAIQNLLKEFSQNYRLEHRDGALYLGWMNRHMATSSAWR

SEQ ID NO: 2026 - protein, 212 aa, Saxifraga careyana
KRRNGLLKKAYELSVLCDAEVALIVFSTRGRLYEYSNNSVKQTIERYKKACSGPSNSGSVSEANAQSYQQEASKLHAQINNLQNTNRQMLGEALGSLSPRDLKNLENKVEKGISKIRSKKNELLFSEIEYMKKREIDLHNENQYIRAKIAETERAQQQMSLMPPGGGSTNYDQQLNMHPQQFDSRDFFQVNALQPNNHHYSRQHDQISLQLV

SEQ ID NO: 2027 - protein, 249 aa, Diospyros kaki
MGRGRVELKRIENKINRQVTFAKRRNGLLKKAYELSVLCDAEVALIIFSNRGKLYEFSSINNMPKTLERYQKCSYGTLEDNRSAKEMEQNSYREYLKLKAKYEELQHFQRHLLGEDLGPLNLKDLEHLEHQLETSLKQIRSTKTQSMLDQLCDLQNKEKMWIEANKALERKLDEIYRENQLQSSWGGGGGEQGNSSFNHHHHHPHSQAFFHPFDCNPTLQIGYPEVSNQMGTAATHEQNMNGLVPEWML

SEQ ID NO: 2028 - protein, 207 aa, Olimarabidopsis pumila
MATFEDGSDLEAIQKHLFEDLLVCDGFMGDFDFDASFVSGLWCIEPQVPKQEPDSPVLDPDSFVNEFLQVEAESSPSSPELNTSPLSTYETDQSVKKAERFEEEEEARHYRGVRRRPWGKFAAEIRDPAKKGSRIWLGTFESDVDAARAYDCAAFKLRGRKAVLNFPLDAGKYEAPANSGRKRKRSDVQEELQRTQSNSSSSSCDAF

SEQ ID NO: 2029 - protein, 569 aa, Oryza sativa
MLMNLCPAKCQDGRGYPPWNFLAGTGTAGWPYRSDLANPTSLQQQQQQRGDLISLPARRALLKEVIKQLSSVLLAIYIFEVHPHWINRPRVNRVSNITDSHAEKDHHSSTRPPPYAHLYSQLATRRRLTHACARSLPDAYESGMNRGHISSSELIDAKLEERRISTAKHCPSCGNKLDCKPELIEHLEAKVREEGSRSHPLIDEFIPTIEGEDGICYTHPEKLPGVTRDGLSKHFFHRPSKAYTTGTRKRRKIQTECDVQKGETRWHKTGKTRPVMVSGRQKGCKKILVLYTNFGKHRKPEKTNWVMHQYHLGDLEEEKEGELVVCKIFYQTQPRQCSWSSDRGGGAAATASAVTTAAVQQDQQRRRDSGSGSCSSTRDHEVSATSYSTAGYAVAAAVEMQHLKHAADHFSFAPFRKSFEEVGISGDQVHSNQLGRSEQQHAGQEQQPHRPLLATTTAVPATAFLISRPTNPVSNIVPPAMQHASVVLDHDQFHVPAILLHHDKFQLLFYPNIINNEHATQQQQQQKLDRRSAGLEELIMGCTSSSTKGVCFYSKHADERERERNLQYS

SEQ ID NO: 2030 - protein, 88 aa, Triticum aestivum
MSSGSSSRSTSPSSDSEWIKKENKMFEEALAYYGVSAPNLWEKVASAMGGTKSAEEVRRHFQILVDDVNSIEHGRIPFPKYKTQGFWT

SEQ ID NO: 2031 - protein, 324 aa, Solanum tuberosum
MVFSSFPVYLDHPNLHQLQQPDGHQQGNTGLENPTLQPPPMQVGASPGSIRPGSMVDRARLAKIPLPEAGLKCPRCDSTNTKFCYFNNYNLSQPRHFCKTCRRYWTRGGALRSVPVGGGCRRNKRSKSNNNNNSSKTAGSNVNTNTIASGTSTSASPSSCSTEIMNGRHHFSHEQPPQLTPLMAAFQNLNHHYGGFQPPPLVSTHHGNGTGALGHHHEMGFQIGSSTNTNNLPVPPGGGSDHQWRLPSLAANTNLYPFQHGTDQGIHESSSVNNNNINAHDDQGLNSTKQFLGTMENNTNQYWGGNAWTGFSGLNSSSSASHLL

SEQ ID NO: 2032 - protein, 216 aa, Oryza sativa
MDRKDKARKNFSSSSSSSAASMAALAAAAAAGDGGAALPSPMEEDKKPRLVASSLAPVAGGGGGGSSSSAAVAAGASSSSSSSSVAAAARRGAGRAGGGAPSGGGGGPRCQVERCGVDLSEAGRYNRRHKVCQTHSKEPVVLVAGLRQRFCQQCSRFHELTEFDDAKRSCRRRLAGHNERRRKSAADTAHGENCRHADQDAGRSHQGTGNPPFQIR

SEQ ID NO: 2033 - protein, 407 aa, Brassica rapa
MVEVEELEPLTPVEEEEEEVISYDDLKRRMWKDRNLMEKLKQQKRHSNDVVSLASHRAEASRRKKMARSQDSRKGFVYGIVPDKGKPITGSSDSLRRWWKETVQFDQTAPNAVSDYLTIAAAAAAEMIEKEPSSLLHMLQELQDTTLGSLLSALMQHCVPPQRRFPLEKGIAPPWWPTGTELWWGEQGEAHEHGVPPYRKPHDLRKSWKVSVLAAVIKHMSPDLGRVRRLATQSKCLQDKMMAKETDTWSRVLNQEEALLNIKDRKISDQDQEASGSKTKRKCDFMEPSKRPRSDVTQEPRQITGDMISMLVTSPSIGTNTTSEDDYSVSSSAMGKPDDYDSNWMDYLWFERMQPEFNSSRRFDDDEDNPMVLNQSTESNQSDNVSQSIFSVWDMGCEDKDIYMFDY

SEQ ID NO: 2034 - protein, 316 aa, Antirrhinum majus
MGRPPCCDKIGVKKGPWTPEEDIILVSYIQEHGPGNWRAIPSNTGLLRCSKSCRLRWTNYLRPGIKRGDFTEHEEKMIIHLQALLGNRWAAIASYLPHRTDNDIKNYWNTHLKKKLEKLQSPENGKCQDGNSSVDSDKSVSKGQWERRLQTDIHMAKQALCDALSLDKTSSSTDDPKLSTVQTTQPRPFQASTYSSAENIARLLENWKKKSPVNASSTSQAGSSESTTTSFNYPSVCLSTSSPSEGAISTNFISFNSSNSDILEDHDQAKFEAATNGVNFQDESKPILDNQMPLSLLEKWLLDDSAAVAQGQDVDF

SEQ ID NO: 2035 - protein, 532 aa, Medicago truncatula
MQTSLNHKMSYDSSMFNIEPIRNLDSYCFLQNENLENYSSSDNGSHSTYPSFQALEQNLESSNNSPVSKLQSKSYTFTSQNSLEIINDSLENESCLTHNQDDLWHKIRELENAMLGQDAADMLDIYNDTVIIQQESDPLLLEAEKWNKMIEMISRGDLKEILFTCAKAISENDMETAEWLMSELSKMVSVSGNPIQRLGAYMLEALVARIASSGSIIYKSLKCKEPITATSKELLSHMHVLYEICPYLKFGYMSANGVIAEALKDESEIHIIDFQINQGIQWMSLIQALAGKPGGPPKIRITGFDDSTSAYARGGGLGIVGERLSKLAESYNVAFEFHAIGVSPSEVRLEDLELRRGEAIAVNFAMMLHHVPDEDVHGGKNHRDRLVRLAKCLSPKVVTLVEQESNTNELPFFARFVETMNYYFAVFESIDVALPREHRERINVEQHCLAREVVNLVACEGAERVERHEVLKKWRSCFTMAGFTPYPLSSYINYSIQNLLENYQGHYTLQEKDGALYLGWMNQPLITSSAWR

SEQ ID NO: 2036 - protein, 428 aa, Lycopersicon esculentum
MLGSFGSSSSQSHPHHDEESSDHHQQRRFTATATTITTTTITTSPAIQIRQLLISCAELISQSDFSAAKRLLTILSTNSSPFGDSTERLVHQFTRALSLRLNRYISSTTNHFMTPVETTPTDSSSSSSLALIQSSYLSLNQVTPFIRFTQLTANQAILEAINGNHQAIHIVDFDINHGVQWPPLMQALADRYPAPTLRITGTGNDLDTLRRTGDRLAKFAHSLGLRFQFHPLYIANNNHDHDEDPSIISSIVLLPDETLAINCVFYLHRLLKDREKLRIFLHRVKSMNPKIVTIAEKEANHNHPLFLQRFIEALDYYTAVFDSLEATLPPGSRERMTVEQVWFGREIVDIVAMEGDKRKERHERFRSWEVMLRSCGFSNVALSPFALSQAKLLLRLHYPSEGYQLGVSSNSFFLGWQNQPLFSISSWR

SEQ ID NO: 2037 - protein, 523 aa, Salinibacter ruber DSM 13855
MSTSLRAGRRKMEESSRALDRKENALYIGHLFFGHSQPLRAETGTAVTVHHRCKDPRIVMSKRIFVVDDEPKIGNLFSNVLERDGYDVDAFVNPNSLLEALDEDSGEPDVVVTDMIMPQMDGVELMEHLDERDLDVPIIIMTAHSSVQTAVEAMRQGAFHYLEKPVNLEEMRALLEKAIELYGAQQELKQIKTEKQKQYPIEGILGESDPVVEVRETLETLCNASNTTVLFTGETGTGKNLAAQTLHYNSPRAEEAFTDIDCASLPDNLLEAELFGYEEGAFTDARDSKEGLIEVADGGTLFLDEIDSMSLALQAKLLSFLESREFRRLGGVEDKSADVRILCATNSDLEKSVQEDEFRKDLFFRINVVNVKMPPLRSMGDDVLLIGRHIVSEFNREFGSDVSGFTNAAREKLLNHTWPGNVRELRNVIERAMIFVEGDQIEAEDLTLAPPSRLDEREQPVGNNGFQFALGQTLKDVEKAYIRRTLETRADDSYADIADDLGISKKTLWDKRKRYDLDEVVDR

SEQ ID NO: 2038 - protein, 58 aa, Hordeum marinum
KGKLPKEARQKLLHWWELHSKSPYPSETEKMALGESTGLDQKQINNWFINQRKRHCKP

SEQ ID NO: 2039 - protein, 297 aa, Triticum aestivum
RQFRLRPIQVTLYNKFVQKSRLVPVRNSRDIVDPRVRTYIRKLRSNFLGTKFLIYDTQPPYNGAVVPPVGRSSRRFNSTRVSPKVPAVSYNIAQVTYELNVLGTRGPRRMRCIMHSIPASSVEPGGVVPGQPEQIVPRALGDSFRSITSFSQSFRSSATFSRSIMDQSMDFNSARFSEISGGGMTDGDGEGEVKERPLVLRNKPPRWHEQLQCWCLNFRGRVTIASVKNFQLTAASNPPPAGAPTPSQPGPVDPEKVILQFGKVARDMFTMDYRYPLSAFQAFAICLSSFDTKLACE

SEQ ID NO: 2040 - protein, 437 aa, Zea mays
  misc_feature (309)..(309): Xaa can be any naturally occurring amino acid
MSFRSIVRDVRDGFGSLSRRGFEVKFLGHRRGRSHGAVHELRDPAPVIQSSCWANLPPELLRDVIERLEASEATWPNRKSVVSCAAVCRTWREICKEIVKNPEFSGKITFPVSLKQPGPRDVTIQCFIKRDKSTQTYYLYLCLSTAVLVESGKFLLCAKRTSRPTCTEYTIFMNSENLSRSSKMYIGKLRSNLLGTKFAIYDTQPPCNAAEPGKTSRRFYSRKVSPKVSSSTYNIAQVSHELNVLGTRGPRRMNCVMHSIPTSCLEAGGSVPSQLDSILARSTDESFGSISFSKSSVVDRSMRFSSSRXSDISMSSSRRIGDTASGDNDECKERPLILRNKAPRWHEQLQCWCLNFRGRVTVASVKNFQLVAATQPAAGAPTPSQATPVPPPEHEKVILQFGKVAKDMFTMDYRYPLSAFQAFAICLSSFDTKLACE

SEQ ID NO: 2041 - protein, 233 aa, Allium sp. AL-2003
VQLKRMENKINRQVTFSKRRNGLLKKAHEISVLCDAEVALIVFSAKGKLYEYSTDSSMEKILERYERYCFAEKSSTMSDIDSQEDWSLEYHKLKAKVESLNNRQRHLMGEQLESLSLREIGQLEQQLENSLKTVRTRKSQELLSSISELQDKEKTLRDENKALENELMKRARAKAILEQQARWKHHNHKQQDNLHNPNINIGNYQTRNNEGGVEPATDVQVRVVRNLLPHWML

SEQ ID NO: 2042 - protein, 125 aa, Brassica napus
  misc_feature (5)..(5): Xaa can be any naturally occurring amino acid
  misc_feature (7)..(7): Xaa can be any naturally occurring amino acid
  misc_feature (10)..(10): Xaa can be any naturally occurring amino acid
  misc_feature (25)..(25): Xaa can be any naturally occurring amino acid
  misc_feature (35)..(35): Xaa can be any naturally occurring amino acid
  misc_feature (47)..(47): Xaa can be any naturally occurring amino acid
  misc_feature (85)..(86): Xaa can be any naturally occurring amino acid
  misc_feature (94)..(94): Xaa can be any naturally occurring amino acid
HSSPXWXSAXEFLDEKAVKSQKKKXQFSSLEVQSXTRRCSHCGVQKXPQWRAGPLRAKTLCNACGVRFKSGRLLPEYRPACSPTXXTELHSNHXRKVIEMRQKKEMSGDADKPGMNRTVQAVRSF

SEQ ID NO: 2043 - protein, 251 aa, Triticum aestivum
  misc_feature (180)..(180): Xaa can be any naturally occurring amino acid
  misc_feature (242)..(242): Xaa can be any naturally occurring amino acid
MRTDVRRGAAAAGRDQFPVGMRVLAVDDDPVCLKVLETLLRRCQYHVTATNQAVIALRMLRENRDMFDLVISDVHMPDMDGFKLLELVGLEMDLPVIMLSVNGETKTVMKGITHGACDYLLKPVRIEELRNIWQHVVRRKFSTRDSVNLDTYEECNKPPSADSDYVYGQVTCGSPDQSGXGPAKKRKEYHSEEEDEDEDSSGQDNDDPSAPKRPRVVWSVELHRKFVAAVNHLGIDKAVPKXLELMNVEKL

SEQ ID NO: 2044 - protein, 375 aa, Triticum aestivum
  misc_feature (65)..(65): Xaa can be any naturally occurring amino acid
  misc_feature (76)..(76): Xaa can be any naturally occurring amino acid
TSLYKKAGWYRSGIPGISSTHASVMVPELRKMVSVSGTPLERLGAYMVEGLVARLASSGHSIYKXALRCKEPKSSXDCSSYMHFLYEACPYFKFGYMSANGAIAEAVKGEDRIHIIDFHIAQGAQWISLLQALAARPGGPPTVRITGLDDSVSAYARGGGLDLVGRRLSHIAGLCKVPFEFHSVAMAGEEVEEGHLGVIPGEALAVNFTLELHHIPDETVSTANHRDRILRLVKSLRPKVLTLVEQESNTNTAPFPQRFAETLEYYTAIFESIDLTLPRDDKERVNMEQHCLAREVVNLIACEGAERVERHEVFGKWKARLTMAGFRPSPLSSLVNATISTLLQSYSENYKLAERDGALYLGWKNKPLVVSSAWH

SEQ ID NO: 2045 - protein, 302 aa, Oryza sativa (japonica cultivar-group)
MGRHACSAAGVQQKLRKGLWSPEEDEKLYNHIYRYGVGCWSSVPKLAGRLQRCGKSCRLRWINYLRPDLKRGSFSQQEEDAIVGLHEILGNRWSQIASHLPGRTDNEIKNFWNSCLKKKLRQRGIDPSTHQPISTAAAAAAAALDTSTQDQKPPATADGFALKQQQQVFDPFPVIDSFGSGFDATGMPLYGHLGGKDAAGFVDYSSVLDVSENLGYGESSSNSSNWNCGVGAPEVNNALESEPLHWATESKVEPFVGYGEGDAMEHKFGLPCHGQQEQGMTHFDFDVSRSMVVGDFNFEYFR

SEQ ID NO: 2046 - protein, 679 aa, Glycine max
HASADECLPPLDMSKQPPTQELVAKDLHANEWRFRHIFRGQPRRHLLQSGWSVFVSSKRLVAGDAFIFLRGENGELRVGVRRAMRQQGNVPSSVISSHSMHLGVLATAWHAILTGTMFTVYYKPRTSPAEFIVPYDQYMESLKNNYTIGMRFKMRFEGEEAPEQRFTGTIVGIEDADTKRWPKSKWRSLKVRWDETSNIPRPERVSQWKIEPALAPLALNPLPMPRPKRPRSNVVPSSPDSSVLTREASKVSVDPLPTSGFQRVLQGQELSTLRGNFAESNESDTAEKSGVWPPATDDEKIDVSTSRRYGSDSWMSMGRHEPTYPDLLSGFGAHGDHSSHPSFVDQNGPVANLSRKHLLDREGKHNVLSPWPGVPSSLSLNLLDSNLKGSAQGGDTAYQVRGNLRYSSAFGEYPVLHGHKVEHSHRSFLMPPPPSTQYESPRSRELLSKPISGKPCEVSKLKDSDCKLFGISLLSSRPIASEPSLSQRNVTSESVGHMHTASHHQRAIENDQKSEHSRGSKPADGLLIDDHEKVLQTSQPHLKDVQAKSHSGSARSCTKVHKKGIALGRSVDLTKFSDYGELITELDQLFEFGGELTSPQKDWLIVYTDNEGDMMLVGDDPWQEFVAMVRKIYIYPKEEIQKMSPGTLSSKNEENQSASEGAADAQEIECQLNHSSSDT

SEQ ID NO: 2047 - protein, 294 aa, Brassica napus
MQEAALGMIGATVGGGGDGDAAVVAEQNRQMKGEIATHPMYDQLLAAHVACLRVATPIDQLPIIEAQLSHSHHLLRSYASTAVGFSHHDRQELDNFLAQYVMVLCSFKEQLQQHVRVHAVEAVMACREIENNLHSLTGATLGEGSGATMSEDEDDLQMDFSSDNSGVDFSGGHDMTGFGPLLPTESERSLMERVRQELKLELKQGFKSRIEDVREEIMRKRRAGKLPGDTTTVLKNWWQQHCKWPYPTEDDKAKLVEETGLQLKQINNWFINQRKRNWHNNSHSLTSLKSKRKH

SEQ ID NO: 2048 - protein, 186 aa, Oryza sativa
  misc_feature (29)..(29): Xaa can be any naturally occurring amino acid
GCRNSARRGRASGTMNQCIHPTLPVDPKXDGNAAAQPFPHNYAAFAPMMQCHCNQDAYRSFANMSSTFSSMLVSTLLSRPAIHAAARLAASYWPTVDGNTPDPNQENLSESAQGSHAGSPPNMASIVAATVAAASAWWATQGLLPLFPPPIAFPFVPAPSAPFSTADVQRAQEKDIDCPMDNAQKE

SEQ ID NO: 2049 - protein, 58 aa, Santalum album
KKKGKLPENAKTTLLDWWSTHYRWPYPTEEEKMKLSEITGLDPRQINNWFINQRKGSR

SEQ ID NO: 2050 - protein, 70 aa, Arabidopsis thaliana
AKGKHYRGVRQRPWGKFAAEIRDPAKNGARVWLGTFETAEDAALAYDRAAFRMRGSRALLNFPLRVNSGE

SEQ ID NO: 2051 - protein, 431 aa, Daucus carota
MFGSEQEESSPQNIINMHFDHQHHQTTITSPSVHMRQLLISCAEHISRCDFYGAHRLINILSANSSPCGDSTERLVHQFSKALSLRLHSFAATSTITSGSTSNLVIPSLLTPKISPALPSSAGSGSGSQQVFDDESVVQSAYLSLNQITPFIRFTHLTANQAILESVEGHHAIHILDFNIMHGVQWPPLMQAMAEKFPPPMLRITGTGDNLTILRRTGDRLAKFAHTLGLRFQFHPVLLLENEESSITSFFASFAAYLQPDQTLAVNCVLYLHRLSLERLSLCLHQIKALNPRVLTLSEREANHNLPIFLQRFVEALDHYTALFDSLEATLPPNSRQRIEVEQIWFGREIADIIASEGETRRERHERFRAWELMLRGSGFHNLALSPFALSQAKLLLRLYYPSEGYKLHILNDSFFWGWQNQHLFSVSSWH

SEQ ID NO: 2052 - protein, 243 aa, Oryza sativa
MGQSKKKFRGGRQRHWGSWVSEIRHPLLKRRVWLGTFETAEEAARAYDEAAILMSGRNAETNFPVARNATGELTPAAAVAGRDGRVGGGSGSSSSMTANGGGNSLSQILSAKLRKCCKTPSPSLTCLRLDPEKSHIGVWQKRAGARADSSWVMTVELNKDTAVSSAATVAAATAVSSSDQPTPSDSTVTTTSTSTTGSPSPPPPAMDDEERIALQMIEELLGRSGPGSPSHGLLHGGEGSLVI

SEQ ID NO: 2053 - protein, 219 aa, Aspergillus nidulans FGSC A4
MSSTSPSKEPEVEQEPQSGEEHEQMDKEQDNQTQGQGEFEVKEQDRWLPIANVARIMKLALPENAKIAKEAKECMQECVSEFISFITSEASEKCQQEKRKTVNGEDILFAMTSLGFENYAEALKIYLSKYRETQSARGEHQNRPPSSGYAGGGPVGGAASGPSVVRAGGAAAGGAFPEASDNAGSIMNQGLDPSEQDASAYGYPPMVGQGHNGAGGESY

SEQ ID NO: 2054 - protein, 528 aa, Arabidopsis thaliana
MAHQHFFKPLLPGFHASLTIPVAFFLKYIEGRYEQKTAKLRSDASKRTWEVKIDGQRLTDGWKEFAVSHDLRIGDIVVFRQESDLAFHVTLLGPSCCGIQYGSCSVEKNNLGDEKKKVKENPNGEAESSSRDPSCFVANVAPSSLRYDLMRFPRGFVRDNGVVGSGEIVLMNEKGRSWNFNLRQKPSNGTVYVRGGWVSFCDANGLKAGDNYTFKLIKRAGTLVLRLLPNEPKEEANEVSLPEEPESDAERNLEKIQRKEKVKKNVTREAESSSQDPSCFVANVSPSSLRYDTLYLPKRFMRENGVDKRCGEMILINEKGKSWTLDLKVKKSSGTSLIKRGWRSFCSANGLRAGSIITLKLIKKRATLVLRLIPNEPEEANEVVSLSTEQESDEESIHDEKISRRKSLLSENRFVTLTLTPYTIQSSLLNENLLCESMFQRLPVPFTRMNGINEETKMTLLDKHGVKWLTTLRFEDDKRKRLRMVGGWQGFIQANDVKANESIMLELIWEEETSCVLKFCSKVKLEIK

SEQ ID NO: 2055 - protein, 58 aa, Oryza officinalis
KGKLPKDARQQLLNWWELHYKWPYPSESQKVALAESTGLDLKQINNWFINQRKRHWKP

SEQ ID NO: 2056 - protein, 227 aa, Phalaenopsis hybrid cultivar
IKRIENTTNRQVTFCKRRNGLLKKAYELSVLCEAEIALIVFSSRGRVYEYSNNSIKATIEKYKKTCAGSSNPGSLVEVNSHQYYQQESAKMRHQIQLLQNSNRHLMGDGLSSLNLKELKQLENRLERGITRVRSKKHELLFAEIEYMQKREVELQNDNMYLRAKIADNERAQQANIVQAGVDFESIPSFDSRNYYHINMLESASHYSHHQDQTALHLGYETKADQSA

SEQ ID NO: 2057 - protein, 396 aa, Oryza sativa (japonica cultivar-group)
MCGGAIISGFIPPSAAAAAAAAVAKKQQGRRVTADVLWPGMLRKGKAAAAEEDFEADFREFERGMSDDEAEGGGGEEEEDDDDVVVVVPPPAAARFVVRAAAKAAPPTADGMLTTKLVQHDGPTARSAKHKRKNQYRGIRQRPWGKWAAEIRDPSKGVRVWLGTYNTAEEAARAYDAEARKIRGKKAKVNFPDEPAVAQKLSLKQNAAKQEKLAPPLKTCGDDAFFQLNSSDNDLFAMLAKVPAKPAEPVDLMPPVKPLASTETFEMNMLSDTSSNSFGSSDFGWEDDTLTPDYTSVFVPNAAMPAYGEPAYLTGGAPKRMRNNYGIAVPQGNGMPNLAQNMPTFDPEMKYLPLPYVESSSDESMDNLLQNDATQDGASNEGIWSLDELLMAAGAY

SEQ ID NO: 2058 - protein, 451 aa, Triticum aestivum
FVAAVNHLGIDKAVPKRILELMNVEKLTRENVASHLQKYRLYLRRLSAVASQQAGIVAALGGRDPFLRMDAFEGLQGYQAFTSPAALSTFSAHGLLNSPRNNQTAVVIQGVATSRSIPTGSSSCTTNPLIGDAAKYHLSLPGNQHGNLGQGLATSLGQAQLQQKWMNEGSGDLSTILSGNSRANGMPRMLPSVTSSPLLPPDLVECTQAKVAIQPSVRAPSASVELLEGAIGASSGPLESRVSQQSALPSSGFSANMLPVHGSFNNNGASFSSNGATRLGDAFSASFRPTNDLTVARGTKVGAGSFGGTIHLSPDTEQKYLSFGSSDSLLDPKLVWSSSQLPSNIGAHYHSMSQRSNNCSIDSSHGGRMFGQTSASASTAAPQTKFDILFSGDTSMARNASESGPQRLQSELSSSTCSFDGLLNSMIKVEKDDAAFGDDLGCDFYSLGACI

SEQ ID NO: 2059 - protein, 245 aa, Lilium longiflorum
MGRGKIEIKRIENTTNRQVTFCKRRNGLLKKAYELSVLCDAEVALIVFSTRGRLYEYANNSVKGTIERYKKASSDAFNTGSVSEANAQYYQQESSKLRNQIVSLQNAHRSMLGESIGSMGTQGTEIHGEKAGKMDNNKIRTKKNELLFAEIEYMQKREAELQNNSMFLRTKIAENERSQQQQMDMERSQQQHMDMDRSHQRHLEMLPTTSAFETMPTFDSRNFFDINLIEAHHHYQQQQTALQLG

SEQ ID NO: 2060 - protein, 175 aa, Brassica napus
MGDSDKDSGGGQNGQSPLSPREQDRFLPIANVSRIMKKALPANAKISKDAKETMQECVSEFISFVTGEASDKCQKEKRKTINGDDLLWAMTTLGFEDYVEPLKVYLQRFREIEGERAGLGRPQTGGEGGEHQRDAGLGDGGGFYGGGGMQYHQHHQFLEQQDRVYGSTGGGGGDG

SEQ ID NO: 2061 - protein, 266 aa, Zea luxurians
PSADPSTDSAREPKRMRTGGGSTSSSSSSSSSMDGGRTRSSVVEAAPPAKQASAAANGPAVPVVVVDTQEAGIRLVHALLACAEAVQQENFSAAEALVKQIPMLASSQGGAMRKVAAYFGEALARRVYRFRPPPDSSLLDAAFADLLHAHFYESCPYLKFAHFTANQAILEAFAGCRRVHVVDFGIKQGMQWPALLQALALRPGGPPSFRLTGVGPPQPDETDALQQVGWKLAQFAHTIRVDFQYRGLVAATLADLEPFMLQPEGD

SEQ ID NO: 2062 - protein, 207 aa, Arabidopsis arenosa
MASFQESSDLEAIQSHLFEDLLVCDGFMGDFDFDASFVSGLWCIEPQVPKQEPDSPVLDPDSFVNEFLQVEGESSSSSPELNSSSSSTYETDQSVKKAERFEEEEEARHYRGVRRRPWGKFAAEIRDPAKKGSRIWLGTFESDVDAARAYDCAAFKLRGRKAVLNFPLDAGKYEAPANSGRKRKRSDVQEELQRTQSNSSSSSCDAF

SEQ ID NO: 2063 - protein, 251 aa, Brassica oleracea var. italica
MGRGRVEMKRIENKINRQVTFSKRRAGLLKKAHEISILCDAEVSLIVFSHKGKLFEYSSESCMEKVLEHYERYSYAEKQLKVPDSHVNAQTNWSVEYSRLKAKIELLERNQRHYLGEDLESISIKELQNLEQQLDTSLKHIRSRKNQLMHESLNHLQRKEKEILEENSMLAKQIRERESILRTHQNQSEQQNRSHHVAPQPQPQLNPYMASSPFLNMGGMYQGEYPTAVRRNRLDLTLEPIYNCNLGYFAA

SEQ ID NO: 2064 - protein, 217 aa, Chelidonium majus
  misc_feature (211)..(211): Xaa can be any naturally occurring amino acid
VKKAHEISVLCDAEVGLIVFSTKGKLFEFSSESSMDNILERYERQCFVEEELKATHPESEGNWSLEHTKLKARIEILQKNQRHFMGEDLDPLSLKELQNLEHQLDIALKHVRSRKNQLLYASIAELRKKEKALHEQNILLGKKIKQKEEQIAQWSAQQNDAQNSSSFLTQAPQNSQSFLTQALPSLTLRTGYYQTARVVVCEEDGARSNMXMPPWML

SEQ ID NO: 2065 - protein, 662 aa, Dianthus caryophyllus
MSFFENMGYYPNFEFPPQVTVVREEEPVAEVEQEGNDEDYSDDDVDVDELERRMWRDKMLLKRLKEQNKDRCREWIDNVKKRQSQEQARRKKMSRAQDGILKYMLKMMEVCKAQGFVYGIIPEKGKPVSGASDNLRAWWKDKVRFDRNGPAAIAKYQADHLVQGMDEDCTAMGSTPHTLQEFQDTTLGSLLSALMQHCDPPQRRFPLEKGHPPPWWPVGNEEWWPQLGIPNDQGPPPYKKPHDLKKAWKVSVLTAVIKHMSPDIEKIRKLVRQSKCLQDKMTAKESATWLAIINQEESLARKLFPDRCPPPAPGGGGSLVISDTSDYDVDGAGPDSSSDVEDCKPQNINVFNFREKFMGHPVNMITPAIKGEVVETGFDFPVKRKQPSSGSQTVIDQKVFLCENPQCPYNDPCLGFPDRILRHDHQLNCPFRSRGVEVTNTQTTLEKHPSSESTNFTSSFAQQEKFSLQSAMQSPATFNPCTGTVLETGDQLQQNMQRKTTDGRFVGQGSALYGNSTYLGQQSQFQIDNVGFFASHGGNGSQGMFVNGKNNNQVKQKPSLQMSNGFNGVFQSRQQMQAPMDGGFRGLSNMSGNIPQGTKTSAGHQVFSSGGMQQQQQLDQCRTFDSSFPMHLNDDITDFGFNSPFNIDFEPLLRPDNPIWNI

SEQ ID NO: 2066 - protein, 163 aa, Brassica napus
QPDSSGGTLTYEVRMILEDNQITYPYSCLCVFFLKGRFEILSLSGSFMPSDSDGTRSRTGGMTVSLASPDGRVVGGGVAGLLVAATPIQVVVGSFLAGTNQQDQNPRKQNHNFMSSPMPTTSNAADHGTIRPTSSSHQIGTWTPPLASDPRHKPSNDINITLT

SEQ ID NO: 2067 - protein, 204 aa, Arabidopsis thaliana
  misc_feature (168)..(168): Xaa can be any naturally occurring amino acid
MSGEGNLGKDHEEENEAPLPGFRFHPTDEELLGYYLRRKVENKTIKLELIKQIDIYKYDPWDLPRVSSVGEKEWYFFCMRGRKYRNSVRPNRVTGSGFWKATGIDKPVYSNLDCVGLKKSLVYYLGSAGKGTKTDWMMHEFRLPSTTKTDSPAQQALESIKWACLVSXEVWTLCRIFKRVTSQRNPTILPPNRKPVITLTDTCS

SEQ ID NO: 2068 - protein, 266 aa, Zea mays subsp. parviglumis
PSADPSTDSAREPKRMRTGGGSTSSSSSSSSSMDGGRTRSSVVEATPPATQASAAANGTAVPVVVVDTQEAGIRLVHALLACAEAVQQENFSAAEALVKQIPMLASSQGGAMRKVAAYFGEALARRVYRFRPPPDSSLLDAAFADLLHAHFYESCPYLKFAHFTANQAILEAFAGCRRVHVVDFGIKQGMQWPALLQALALRPGGPPSFRLTGVGPPQPDETDALQQVGWKLAQFAHTIRVDFQYRGLVAATLADLEPFMLQPEGD

SEQ ID NO: 2069 - protein, 219 aa, Chelidonium majus
  misc_feature (12)..(12): Xaa can be any naturally occurring amino acid
GLVKKAHEISVXCDAEVALIVFSTKGKLFEYSTDSGMERILERYERYSYAERELVASELDQGNWSLEYTKLKAKIEILQKNQRHFMGEDLESMSLKELQNLEQQLDTALKQIRSRKNQLMYESISELQKKEKVLQEQNNQLGKKLKEKEKEVAQQQAQWDQQSQGQSSPSFLLSQSLPSLNIGGSYHMRGSNGSEEEGVRPQTTRTNTTLMPPWMVHHL

SEQ ID NO: 2070 - protein, 591 aa, Dianthus caryophyllus
MVMLFEEMGICGGEMRFFGEFQEGGGSGGPQFPRDGGPTVEELISDEEMDVEELERRMWRDKMRLKRLKDQSKVKEGVDVAKQRQSQEQARRKKMSRAQDGILKYMLKMMEVCKAQGFVYGIIPEKGKPVTGASDNLREWWKEKVRFDRNGPAAIAKYEADNLIFMNSNAGDSIRSSAHALQELQDTTLGSLLSALMQHCDPPQRRFPLEKGLPPPWWPMGNEEWWVELGLPNDYGPPPYKKPHDLKKAWKVSVLTAVIKHMSPDIAKIRKLVRQSKCLQDKMTAKETATWLTIINHEEGIARQLYPHLCPLLIGGSGGPSYVISDSGDYDVDGTVEEPIVEPQEQKGASSEVNNETQPVILQMPNQIKGEMMFSDGDFTRKRKAAASSEQVINEQFPIYTCGFSGCLHQQRGFGFSDRVSRDNHQLICRFRNNNCLQFGNIQTNTNQVKAANNFQHSYLGSEVGNPGNNSALPLINLQGVGIPDAGQKMIGELMSMYDVNNNSGSVNQNVVQQIGFRQNDQIQFQGRGLTQNSFGPTAIQMNQIGFNRSNRFEHNMQENALNSTLPSPFDLPFIDFMDDVQAGTSSAWYR

SEQ ID NO: 2071 - protein, 368 aa, Triticum aestivum
QDEYKPLASKLQVDPAEQQRAMAMAVAASTMEVDQDLPGFRFHPTEEELLGFYLSRVALGKKLHFDIIGTLNIYRHDPWDLPGMAKIGEREWYFFVPRDRKAGSGGRPNRTTERGFWKATGSDRAIRSSGDPKRVFGLKKTLVFYQGRAPRGTKTDWVMNEYRLPDTGAPPPQEDTVLCKVYRKATPLKELEQRAFAMEEMKQRYGSNGGYGYGGAARACPVPAASDFYLSSSDDVQDNFLIPSTSSSSVALSGNTSSHDAPSEAKKEADVATVTLASTSSLPEAGNAPFVLQLPAANPPCGLQLPPANHGMSNMSSLQLPAASHGELQLPAATNHGVFDWLQDPFLTQLRSPWQDQHCMSPYAHLLY

SEQ ID NO: 2072 - protein, 218 aa, Corylopsis sinensis
GLVKKAHEISVLCDAEVALIVFSTKGKLFEYSTDSCMEKILERYERYSYAERQLVATDPNSQGNLSLEYSRLKAKVELLQRNQRHFLGEDLDSLSLRELQTMEQQLDTALKRIRSRKNQLMYESISELQKKEKAMQEQNNMLAKKIKEKEKTMTQQAQWEEQNQDPGAASFLLQQPLPCLNIGNTYNQGVGGGAPEVRRNELDLTLEPVYPCHIGCFA

SEQ ID NO: 2073 - protein, 704 aa, Dianthus caryophyllus
MGLFENMGYCTNSEFPPAQTAFGVEERERECEECSDDDVDVEELEQRMWRDKMLLRRLKEQTKDKCATEVDCGKKHQSQEQARRKKMSRAQDGILKYMLKMMEVCNAQGFVYGIIPEKGKPVSGASDNLRAWWKEKVRFDRNGPAAIAKYQADHSVPGMDEDCSATGSTPHTLHELQDTTLGSLLSALMQHCDPPQRRFPLEKGIPPPWWPVGDEEWWPQLGIPNDQGPPPYKKPHDLKKAWKVSVLTAVIKHMFPDIAKIRKLVRQSKGLQDKMTAKESATWLAIINQEDSLARQLYPYRCPPPLPCGNGFLVVGDASDYDVDGVGPDLVSDIEECKPRSNNGFDFQVCSEGEKFTANPMNMITPAIKGEAVDASFDFPQKRKQPSSESQLANEKKVFICENSRCPYSGSRLGFPDRISRHNHQLNCPFRVNSTRRVDIGTFLNTIEKLPSLESSNLTSSVAPQSETPSTSTISASGLGIPEYGQKFIANLISVYDSNLQPNENFNLGTGIASETSDLMQKNMLLNMDGTTAGNFNDHKQTQLQPQSLNDRDFFTLEGMIGDNASRGMNNAGATESSNFRTVTGSAVASKAKNVIHSPTKNAASREQTSFINQGITQTAQDRMDYHFHGQAAKLGDNFSRGSNVSGFVYETDGTQQQQLDQCRTFNSSFVMPLNEDAADFGFNSPFNLDFESLLTPDSSVWNI

SEQ ID NO: 2074 - protein, 229 aa, Corylopsis sinensis
VQLKRMENKINRQVTFSKRRAGLLKKANEISVLCDAEVGLIVFSTKGKLYDMERIFDRYERYSYAERQLVVTNHESQGSWTIEHAKLKARMEVLQRNQRHFMGENLDSVSLKELQNLEHQLDNALKHIRSRKNLLMQESISELQRKDKSLQEENNSLSKKIKEKENALAHRAQWEQQNQGLNSFPILLSQPPQSLNIGTYQTGCSEGEEGTPFQQRPNTLLPHWMVSHL

SEQ ID NO: 2075 - protein, 282 aa, Perilla frutescens var. crispa
GSWRSLPKLAGLLRCGKSCRLPWTNYLRPDIKRGPFSTEEEKLVIQLHGILGNRWAAIASQLPGRTDNEIKNLWNTHLKKRLLLMGIDPHTHEPSLTSNGLLTRPPSSPSTRHMAQWESPRLDAEARLSKESLLSIHAPLPKSEADHFLRLSNSEVGETFRKIKNGEKAEPPSPSQSPGSSASTKCCSFSGTTTEIGLQSGLHETDCKSSKTCTEYVRTGTDSSSSNEMEDSSESTLQLLLDFPCKNDMSFLGNADCYSLYPGFTNGSLYDSSSQEKKGGFV

SEQ ID NO: 2076 - protein, 273 aa, Triticum aestivum
  misc_feature (90)..(90): Xaa can be any naturally occurring amino acid
  misc_feature (198)..(198): Xaa can be any naturally occurring amino acid
MLLLNPASEAAAAALDSIRQQLLEEPARPAYCRSASFGSLVADQWSESLPFRPNDADDMVVYGALRDAFSCGWLPDGSFAAVKPEPLPSXRRSYDGSCLGSFLASPPGLDAPWAEEEAEVAATASRGKHFRGVRQRPWGKFAAEIRDPAKNGARVWLGTFDSAEDAAVAYDRAAYRMRGSRALLNFPLRIGSEIAAAXAAAGQKRPSPQPASPDSPPPSSSAPGSSKRRKRGEAAAESMSMALVPPPPVQAPVQLTLPVQPWLATGAVQQLVS

SEQ ID NO: 2077 - protein, 239 aa, Zea mays
  misc_feature (44)..(44): Xaa can be any naturally occurring amino acid
  misc_feature (53)..(53): Xaa can be any naturally occurring amino acid
  misc_feature (66)..(66): Xaa can be any naturally occurring amino acid
  misc_feature (72)..(72): Xaa can be any naturally occurring amino acid
LGEQTKPALATASNERVGEGKGLGGYVKSLTDEQMEVLRKQISXYATICEQLXEMHRVLTEHQDIXAGMSVXNLYCDPLIIAGGHKITARQRWQPAPMQLQILESIFDQGNGTPSKQKIKEIAAELSQHGQISETNVYNWFQNRRARSKRKQAAASLPNNAESEAEADEEPLADKKPKSDRPPPPPPPIQDNTKATGALSADRVSGGTRHLDTGHDQTSGVMYGCNDSGSLRSSASSGV

SEQ ID NO: 2078 - protein, 129 aa, Photorhabdus luminescens subsp. laumondii TTO1
MANKDLRFLVVDDFSTMRRIVRNLLKELGFNNVEEAQDGAEALAKIRASQFDFIISDWNMPNMDGLELLKIIREDAQLAKIPVLMVTAEAKKENIIAAAQAGASGYVVKPFTAATLEEKLNKIFEKLGL

SEQ ID NO: 2079 - protein, 366 aa, Glycine max
MLYQTPYPQPFQFHHPLPSSFSPLLAVPTTPPPLYLPFPQAEKEMECVEAALKSNYRKEMTLKLSPQTFTEEVSVQNGTTCDDFFVNDLLDFSHVEEEPEQQEDTPCVSLQHENPSHEPCTFKDDYASVPTSELSVLADDLADLEWLSHFVEDSFSEFSAAFPTVTENPTACLKEAEPEPEIPVFSFKTPVQTKARSKRTRNGLRVWPFGSPSFTDSSSSSTTSSSSSSSPSSPLLIYTQSLDHLCSEPNTKKMKKKPSSDTLAPRRCSHCGVQKTPQWRTGPLGPKTLCNACGVRFKSGRLLPEYRPACSPTFSSELHSNHHRKVLEMRQKKETVSVDETGFAPAHVVPSLFKHNKVGTGGGKGV

SEQ ID NO: 2080 - protein, 310 aa, Triticum aestivum
RTRPPTRPPSSIASSSLSTLAASRCRERGGRHRRLLSATPLRPGEMEGFEFFQIILDNSSSRLRLPDKFTRVLLDGGKPQEVKLREAGHRRRFWDVKVVLDADGHMYLGRGWEQFARAHGLRLGYFLVFSYDGDAVLTVKVFDVSMCRRHYQHDGDTSSGSSSDGDSGSSNTSDGGGGGNNWSLAEMDVEDGPTGQFSAMLRKCNLGMKQEQYLNVPVDFQLAHGYAERSKVELRMRGKSWLVHLKHNPKTGGRSRASFRYGWHQFCVDNALGVGDTCFFRALRQGSAGGGGEDHLLKVEVRKRDGSFLV

SEQ ID NO: 2081 - protein, 222 aa, Brassica napus
MAFHHNHLSQDLSFNHFTDQDGPPPPPPQQQQQQQHFHDAPPPNWLNTALLRSDNNNFLNLQTSAANTTAATTSDSPSSAAANQWLPRSSSILQRAENNNSSGAAVVVDEGGAETMIGGENKNDGGGGGAATAAEGVVSWQNARQKAEILSHPLYEQLLSAHVACLRIATPVDQLPRIDAQLAQSQNVVAKYSALGAGQGLVGDDDKQLDQFMTHYVLLLGS

SEQ ID NO: 2082 - protein, 263 aa, Zea mays subsp. parviglumis
PSADPSTDSAREPKRMRTGGGSTSSSSSSSSSMDGGRTRSSVVEAAPPATQAANGPAVPVVVVDTQEAGIRLVHALLACAEAVQQENFSAADALVKQIPVLASSQGGAMRKVAAYFGEALARRVYRLRPAPDGSLLDAAFADLLHAHFYESCPYLKFAHFTANQAILEAFAGCRRVHVVDFGIKQGMQWPALLQALALRPGGPPSFRLTGVGPPQPDETDALQQVGWKLAQFAHTIRVDFQYRGLVAATLADLEPFMLRPEGG

SEQ ID NO: 2083 - protein, 621 aa, Phalaenopsis equestris
MGFPCGLDFSHFTPPSHDKNVTFMPIIQPPPPHPNFSHLPHPPCVDSAMIEGDLVDPLPDNFPEVIPDDEDSDEDIEVEELERRIWRYRLLVKQRKEQQNTKNRDFSDSVKHRQSQEQARRKKMSRAQDGILKYMLKMMEVCKAQGFVYGIIPEKGKPVSGASDNLRGWWKEKVRFDRNGPAAIAKYQVDNGIQSPNSELNSRFISPHSLQELQDTTLGSLLSALMQHCDPPQRRFPLEKGIPPPWWPTGKEDWWPQVGFSNDQPPPPYKKPHDLKKAWKVGVLTSVIKHLSPDIDKIRRLVRQSKCLQDKMTAKESATWLAVVKQEEDMFRDLHPDACPPPSSASNGTISFSSSCNEYDVEGVDDDDDDKCGEVMKNQDPIDMNNVFSMNNEEFIRKRAANCEPEMILNQGSVFNGETTKFRRNDYQSMKSNQLYQNSCYSTNPPPFITSSAFQPNENKPQIFSMSPMVVQQPKMASVNLQPAAAIATTPFSISGLGLPDDGQKLIAELLNQYDSNMNHGKVSGEVRAGNEVQKTDTFRLPNEAMSSFFGSKNGGGGSGIFEEANCSQLCSIHEELEQMDQVYQNQATDMSNDFRFGSSFSSPAMDFADSMSRGVGSWFF

SEQ ID NO: 2084 - protein, 191 aa, uncultured bacterium 583
MEEETSFGKILIIDDEKDNTEIIKDVLEDVNYKTVLARSASEAKALISANTFDLVLMDVWMPGQDGISLLAELVSEGFDTPIVMMSGHAEPSDIVKAMKLGAIDFLKKPLHDFLPILRNIMTSPDLGESDQEVSGIDFSLRLKEARNLFERQYLLHHLALNDNNIAIVAEKAGLERTTLYRKLKDLGIDKK

SEQ ID NO: 2085 - protein, 313 aa, Zea mays
AAAQSRRVAVAFQAYNALSPLVKFSHFTANQAILQALDGEDCLHVIDLDIMQGLQWPGLFHILASRPRKPRSLRITGLGASLDVLEATGRRLADFAASLGLPFEFRPIEGKIGHVADAAALLGSRQRRRDDEATVVHWMHHCLYDVTGSDVGTVRLLRSLRPKLITIVEQDLGHSGDFLGRFVEALHYYSALFDALGDGAGAAEEESAERYAVERQLLGAEIRNIVAVGGPKRTGEVRVERWSHELRHAGFRPVSLAGSPAAQARLLLGMYPWKGYTLVEEDACLKLGWKDLSLLTASAWEPADDAAASAPTG

SEQ ID NO: 2086 - protein, 236 aa, Heuchera americana
VQLRRMENKINRQVTFSKRRGGLVKKAHEISVLCDVEVALIVFSNKGKLFEYSTDSCMEKILERYERYSYAERRLVATGSESQENWSLEYTKLKAKIELLQRSQRQFMGEDLDLLSLRELQNLEQQLDTALKHIRSRKNQLMNQSISDLQKKEKAIQEQNNLLAKKIKEKEKAMSQQAEWEQQNNGASTSNFLNPQPLPCLNISSTYQGGAQPEAMRRNELDLTLEPIYSCHLGCF

SEQ ID NO: 2087 - protein, 216 aa, Heuchera americana
ELSVLCDADVALIVFSTKGKLFEYSTDSSMEKILERYERYSYAERQLIATDSELQGNWSLECPKLMARIEVLQRNIRQYMGQDLDPLSLRELQNLEQQLDSALKRIRTRKNQLMHESIAELQKKEKALQEQNNQLAKKIKENEKTVGENAQWQQPNQGHTSSSFMLAPALPPPSLQLPSLNIGDTFQARGVMNGDAGAQTRPSTNTLMPPWMLRHL

SEQ ID NO: 2088 - protein, 647 aa, Glycine max
  misc_feature (14)..(14): Xaa can be any naturally occurring amino acid
PPPKTRIGSASLHXGAKDGKLNLVESSHVNQALNLEKEPLPEKHDLDEGITTVKENKDENRGAVFTLLQEVPCSSVSSANKSSITMSVPLGNPCAFKEITPSVKEVIPRDEKTESFVTIELENGTLEINDRKQTNGTSKDSTLENSDALHMKLVQNEKTDGLDCALTIDGMQGNQNYPRHVTVHVVDGNLGTNTQNPSQDMLFRDSMFQPIGGVNGQQNVFTNSAPSNTSESQNNTARSSVHQSFLPYPPFTQHNQDDYQSFLHMSSTFSNLIVSTLMQNPAAHAAASFAATFWPYANPETSANSPRCSQGGFTNRQIGSPPSVAAIAAATVAAATAWWAAHGLLPLCAPLHTSFACSPASVTTVPSMNTGEAPALKAEQEKTTLQNPPLQDQMLDPEYSEAQQAQHSASKSPAAILSDSESGDAKLNTSSKATDHETNKTIPEHLDSNKTKGRKPVDRSSCGSHTASSSDVETDALEKGEKGKEEPETPDANQLAIDFSNRRRSVSNLTDSWKEVSEEGRLAFQALFSREVLPQSFSPPHALKNKNQQMDNANNNKQNIDDKDEDPDSKKCSSNYEAMQKNLPFVENNEGLLTIGLGQGKLKTRRTGFKPYKRCSMEAKENRVGASNNQGEEQGCKRIRLEGETST

SEQ ID NO: 2089 - protein, 210 aa, Heuchera americana
  misc_feature (194)..(194): Xaa can be any naturally occurring amino acid
SVLCDAEVALIVFSNRGKLYEFCSTSNMLKTLERYQKCSYGAVEVNRPCKELESSYREYLKLKGKFEGLQRTQRNLLGEDLGPLNTKELEQLERQLDSSLKLIRSTRTQFMLDQLSDLQNKEQVLMDSNRSLARKLDEISAKNNNLRLSWEGGEQSIPYSQQQAQPQGLFQPLDCNPTLQIGYNSIGSDPDDYXQLMHRMSTGFMPSWML

SEQ ID NO: 2090 - protein, 342 aa, Solanum tuberosum
MTRRCSHCSTNGHNSRTCPNRGVKLFGVRLTDGLIRKSASMGNLTHFASGSGGGSTPLNGVVHDSPGDTPDHPAVGGGSADGYASEDFVAGSSSSRERKKGVPWTEEEHRMFLLGLQKLGKGDWRGIARNYVISRTPTQVASHAQKYFIRQSNMSRRKRRSSLFDIVADESGDTPMVSRDFLADDPAQAEMQSNNLLPPTPAVDEECESMGSAASANSIDGEHALPIPESSQYQHPLVYPAYVAPFYPMPYPCWPGYTAEPAIAETHEVLKPIAVHSKSPINVDELVGMSKLSLGESIGDAAKPPSLSLKLVEGSSRQSAFHANPSSGSSGMNSSHNPIHAV

SEQ ID NO: 2091 - protein, 176 aa, Arabidopsis thaliana
MAESQTGGGGGGSHESGGDQSPRSLNVREQDRFLPIANISRIMKRGLPLNGKIAKDAKETMQECVSEFISFVTSEASDKCQREKRKTINGDDLLWAMATLGFEDYIDPLKVYLMRYREMEGDTKGSGKGGESSAKRDGQPSQVSQFSQVPQQGSFSQGPYGNSQGSNMMVQMPGTE

SEQ ID NO: 2092 - protein, 392 aa, Zea mays
  misc_feature (63)..(63): Xaa can be any naturally occurring amino acid
  misc_feature (90)..(90): Xaa can be any naturally occurring amino acid
  misc_feature (103)..(103): Xaa can be any naturally occurring amino acid
  misc_feature (207)..(207): Xaa can be any naturally occurring amino acid
  misc_feature (281)..(281): Xaa can be any naturally occurring amino acid
  misc_feature (324)..(324): Xaa can be any naturally occurring amino acid
  misc_feature (368)..(368): Xaa can be any naturally occurring amino acid
LRKGLWSPEEDEKLMNHIVKHSHGCWSTVPKLAGLQRCGKSCRLRWINYLRPDLKRGAFSQEXDLIIEIHAVLGNRWSQIATRLPGRIDXNESKNLWNSSLNXKKKLRQKGIDPNTRKPLAEVVERSKSAPTVSTERTSGSSDVDASSDGALGNSSHLLSETAQSPQLLPVLGKRCQETTGLTHLFLPAKELFLDQLVSGHENLTSXLPQCRSTGSIPDFSFQQLMCYNNEFGNKNCGSNNLLWINQNESSGSTFSATAMPPVSVSPSTLSTSSGLNRSPXFELQSTSSILDGTVFPWTELTTPDKNSHVHLEEELKWPDLLHXTFTHTPKTMQNLSQSLYEDVIKADSQFNTEGLCAAWSQNLQPQXQHLQVVSDFYDKDLQRMSVRTLTR

SEQ ID NO: 2093 - protein, 496 aa, Oryza sativa (japonica cultivar-group)
MKVDVPQEEEDNEMKVDAPQEKKDNEVTADVPEEKGNDEMRVDASESIESIEPVSRSTLDNKKEDQGQMNNVEEKAASDSKDENEKTANDESGQDKVLKKPDKILPCPRCNSMDTKFCYYNNYNVNQPRHFCKNCQRYWTAGGTMRNVPVGAGRRKSKSSSLHYRHLLMAPDCMMGSRVEISKSMNPEAFASAHSTPIQPIGRNETVLKFGPEVPLCESMASVLNIQEQNGTNAAAVPTGENQEDNSCISSITSHNVLPENAAQVDKNSTPVYCNGVGPVPQYYLGAPYMYPWNIGWNNVPMMVPGTSMPESASQSESCSTSSAPWMNMNSPMMPVASRLSAPPFPYPLVPPALWGCLSSWPATAWNIPWIRTNGGCMSPSSSSNSSCSGNGSPLGKHSRDSSLPLKEDKEEKSLWVPKTLRIDDPDEAAKSSILASSSRSSPKVRAKAKQHQRLVLLVLLRQTQLHCRGRSRSRRLLDSLPVEFPIVFVSTVCVL

SEQ ID NO: 2094 - protein, 176 aa, Brassica napus
  misc_feature (148)..(148): Xaa can be any naturally occurring amino acid
DFQISQGGQWVSLIRALGARPGGPPRVRITGIDDPRSSFARQGGLELVGQRLGKLAEMCGVPFEFHGAALCCTEVEIEKLGVRNGEALAVNFPLVLHHMPDESVTVENHRDRLLRLVKRLSPNVVTLVEQEANTNTAPFLPRFVETMXHYLAVFESIDVKLARDHKERINVEQHCL

SEQ ID NO: 2095 - protein, 474 aa, Triticum aestivum
MYHHHLQQQQQQRGESEAAASVDQDSSMSNLTTSASASANPPPPPTPASNKRKRSLPGNPDPESEVVALSPATLMATNRFLCEICGKGFQRDQNLQLHRRGHNLPWKLKQRGSKEVVRKKVYICPEASCVHHDPSRALGDLTGIKKHFFRKHGEKKWKCDKCSKKYAVQSDWKAHSKICGTREYKCDCGTVFSRRDSFITHRAFCDALTEESNKAISGGGLPLPPIAHAQHHAMLYSPHDLMQQQQHQELAAFQDHHHHHQVMQQHCNFDVKPEMQPWPTMPYDDVHHPLLQPLCSATAQSSATSVPTPTQQQQLPAAAAHLSATALLQKAAQMGATIGGAGAGGAGVHYTQMAGSATSATGSATFGLGLSCLSNQQMMSLARTASQGRSGEEGGASGGANDGMTRDFLGLRAFSHRDILGLAGFDSSCMGTAVNTGSNNTNMAPCYEPQQQGQPQPQQQQSSNEPWHGMGSHA

SEQ ID NO: 2096 - protein, 120 aa, Brassica napus
MGRSPCCDESGLKKGPWTPEEDEKLINHIRKHGHGSWRALPKQAGLNRCGKSCRLRWTNYLRPDIKRGNFAAEEEQTIINLHSLLGNKWSSIAGHLPGRTDNEIKNYWNTHIRKKLIQMG

SEQ ID NO: 2097 - protein, 231 aa, Glycine max
MVNVMEWQKQRWQPNGNAEMMYVKVMTDEQLETLRKQIAVYATICEQLIEMHKNISSHQDLAGIRLGNMYCDPLLGSGGHKIASRQRWTPSAMQLQILERIFDQGTGTPTKEKIKEITNELSQHGQISETNVYNWFQNRRARSKRKQQNVAPSANAESEVETEVDSKDKKTKPDEFQSPPSVSAVPADDNLGFQNHGSLQYLNPDDYLTGKMEAPENYDLYQPAGDFNMAG

SEQ ID NO: 2098 - protein, 526 aa, Zea mays
MCGTSHTSPSTASLASSTSPLTSRPAGDWVPRRGPGTSPPPTPSLPPSLTQWGSQSRAATAKILRGLLSPARHCAARAIHPRFTQPTIHPPPHPAAAMCGGAILSGFIPPSGVPAAAAAAKKKQQRRATADLLWPGPGKKGAPREEDFEADFREFERGLGEDDDVDGAGDEVQELPLPEPARLAFAAAVGAPRTAVDGVMTPKDGEGDMPTTATNSAANKRRRKNQYRGIRRRPWGKWAAEIRDPSKGVRVWLGTYSTAEEAARAYDAEARRIRGKKAKVNFRDEAAAAGAQKPPAATTPTACASAARLAPPPPPPKFRADEVFGNMNGGTGSNDLFAIMFAFSDSSSKVVRVEPGEGAAGFLPAVEVLDDEPLLPGSKRSAANMLLLSDQSSDSYGSCDLGWEWDWDDDTMTSDYASVFAPAAPSNVVPAWYTQGGPVSKRTRSSYGYGAAMPGGFDPETNYQYQPLPYVVESSPSDGASTDDMDCLQMMRAGDVPQDGASSGGGGGDGGDIWSLDELLMAAGAY

SEQ ID NO: 2099 - protein, 497 aa, Brassica oleracea var. botrytis
MVPPPQPSLFQLTFLTGDKPILTLDDEFISSHTKVLLISDASDKIWEVKLDGNRLAGGWEEFAAVNNFSEGNVLVFRHNGEEIFHVAVSSESDDDESDDTDDSESDDESNDTDDSESDDSEDNGEGDSSLVNKEADSSSDCFLRARVTPYSLTKDRLDLSKDFKFMLFDEHNKPCEIYLVNEKGRKWTLRLSRNISSGAFYITRGWANFCSANGLIRGDFCYFKLSESGERPVLLLCSHESGNGHEDKEEEEECPEADTLKICSVGGCSNEKNTPSRFLTQKFTPSRFKTGQLYISMLSSGGLRESGIKKTGEIILLDNDGRKWPSYLNKTGQPGGEWCYIRKGWREMCEANGVEVNDSFVLELICEAANPIFKLHSKIRNKGKGNIVTSKKRALHARTVERTPGVEIDGERGSKRGCTRVSNRSNTYLKGKQPESCSVSDQVANVRQSVLDTLNTIRHFKAELKTRERNLEASLLELDALGERILGISKILNNNLA

SEQ ID NO: 2100 - protein, 250 aa, Oryza sativa (japonica cultivar-group)
MEWDKAKASSGEAVDDRGGGEGGLGYVKVMTDEQMEVLRKQISIYATICEQLVEMHRALTAQQDSIAGMRLGNLYCDPLMVPGGHKITARQRWTPTPMQLQILENIFDQGNGTPSKQKIKDITAELSQHGQISETNVYNWFQNRRARSKRKQAALPNNNAESEAEADEESPTDKKPKSDRPLHQNIAMRDHNSERISEMHHFDTEHEQIRRMMYASNDSSSRSSGSLGQMSFYDNVMSNPSTSYKHPCFI

SEQ ID NO: 2101 - protein, 318 aa, Oryza sativa (japonica cultivar-group)
MAVEEASSSSGGGRGGGGGGGGEEGLSGCGGGWTREREKAFENALATVGDDEEEGDGLWEKLAEAVEGKTADEVRRHYELLVEDVDGIEAGRVPLLVYAGDGGVEEGSAGGGKKGGGGGGGGGGGGHGEKGSAKSSEQERRKGIAWTEDEHRLFLLGLEKYGKGDWRSISRNFVISRTPTQVASHAQKYFIRLNSMNRERRRSSIHDITSVNNGDTSAAQGPITGQPNGPSANPGKSSKQSLQPANAPPGVDAYGTTIGQPVGGPLVSAVGTPVTLPVPAAPHIAYGMHAPVPGAVVPGAPVNMPPMPYPMPPPTSHG

SEQ ID NO: 2102 - protein, 102 aa, Beta vulgaris subsp. vulgaris
MASSSSSSPVALSKRGRPRNSGAKNPVFCSVDGCASDLNQCREYHRRHKVCERHSKTPVVLVGGKKPQFCQHCSGCKKIIREESNAQRLPCLSWLENPTGDF

SEQ ID NO: 2103 - protein, 425 aa, Glycine max
  misc_feature (287)..(287): Xaa can be any naturally occurring amino acid
MSFRSIVRDVRDGFGSLSRRSFDVRLSGGGKSNSLVHEEHECLPVVQNSRWASLPPELLRDVIKRLEESETTWPARKHVVACAAVCRSWRGMCKEIVTSPEFCGKITFPVSLKQPGSRDGTIQCFIKRDKSNLTYHLFLCLSPALLVENGKFLLSAKRTRRTTCTEYIISMDADNISRSNSTYIGKLRSNFLGTKFIIYDTQPPYNNAQLSPPGRSRRFYSKKVSPKVPSGSYNIAQITYELNVLGTRGPRRMNCTMHSIPMSALEPGCTVPGQPELLPRSLEDSFXEAYPLARSIDNSTACSRPWAPPIFLAGKEEEQGKDRPLVLKNKSPRWHEQLQCWCLNFRGRVTVASVKNFQLIAATQPPATGAPMPSSQPAQSDHDKIILQFGKVGKDIFTMDYRYPLSAFQAFAICLTSFDTKLACE

SEQ ID NO: 2104 - protein, 174 aa, Glycine max
MSDAPASPSHESGGEQSPRGSLSGAAREQDRYLPIANISRIMKKALPPNGKIAKDAKDTMQECVSEFISFITSEASEKCQKEKRKTINGDDLLWAMATLGFEDYIEPLKVYLARYREAEGDTKGSARSGDGSARPDQVGLAGQNSQLVHQGSLNYIGLQVQPQHLVMPSMQSHE

SEQ ID NO: 2105 - protein, 295 aa, Cucumis sativus
METLYPSSHLSSSAWFVLDNPSTKWTKEENKMFESALAIYDKETPDRWFKVAALIPGKTVSDVIKQYKELEEDVCEIEAGRFPVPGYDLASSFSFEFVDDRNFDVYRRKSSVGRGSEHERKKGVPWTEEEHKQFLRGLLKYGKGDWRNISRNFVNSKTPTQVASHAQKYFMRQLSGGKDKRRPSIHDITTVNLTEPTASENEKLSSMDQFSKLPSLQKSPCYQKLLFDWNRSSNGGLLGLGSNYGDRLMSFPSGIAANGIKNEQDQELNSAYYGTYSKPHKSIFQFEPSRYQIYG

SEQ ID NO: 2106 - protein, 448 aa, Oryza sativa
MSFRSIVRDVRDGFGSLSRRSFEVTLASLYGLTGHHKGKTQSSLDELDDSPAIIPESRWASLPPELLREVIRRLEADESTWPSRRNVVCFAAVCRTWREMCKETVLSPEFCGKLTFPVSIKQPGPRDGMIQCYIKRNRSKSTYHLYLCLSNVVTAEGGKFVLAAKRHRKTTCTEYTISMVSGNISRSSRTNIGKLRSNFLGTKFIIYDTQPPYNGAVVPHVGRTSKRFNSTKVSPKVPSVTYNIAQVSYELNVLGTRGPRRMRCMMHSIPASSVEPGGIVPGQPEQIVPRALEDSFRSTTSFSQSFRSTTSFSKSIMDPSMDFSSARFSDISGSIMGGDDNGEIKERPLVLRNKPPRWHEQLQCWCLNFRGRVTIASVKNFQLVAAPSPPPAGAPTPSQPGPADPEKVILQFGKVARDMFTMDYRYPLSAFQAFAICLSSFDTKLACE

SEQ ID NO: 2107 - protein, 214 aa, Michelia figo
  misc_feature (210)..(210): Xaa can be any naturally occurring amino acid
RPCAEMSMLCDAEVALIVFSSRGKLYEFGSAGVNKTLERYQRCCYTFQDANITDRDTQGWYQEVSKLKAKCDSLQRSQRHLLGEDLGPLSVKELQKLERQLESALTQTRQRKTQIMLEHMEALREKERQLGDINKELKNKLEAKGQGAFRAMQASWESGPLVGNNGFPMHPSQSAAIECEPTLQIGYHSFAAPEASIPRTVVAESNFMPXGMLC

SEQ ID NO: 2108 - protein, 219 aa, Oryza sativa (japonica cultivar-group)
MPDSDNDSGGPSNYAGGELSSPREQDRFLPIANVSRIMKKALPANAKISKDAKETVQECVSEFISFITGEASDKCQREKRKTINGDDLLWAMTTLGFEDYVDPLKHYLHKFREIEGERAAASTTGAGTSAASTTPPQQQHTANAAGGYAGYAAPGAGPGGMMMMMGQPMYGSPPPPPQQQQQQHHHMAMGGRGGFGHHPGGGGGGSSSSSGHGRQNRGA

SEQ ID NO: 2109 - protein, 920 aa, Arabidopsis thaliana
MADQSLLHSPINPHFFQPILTESRTHLNIPVAFFSKHVEGRNNQNKTVTLRSDASDKTWLVKMDGLKLTDGWEDFAFAHDLRTGDIVVFRLEGEMVFHVTALGPSCCEIQYHTSSHNINDDDRNDQINIASRNSSRVKKNPRKKVESSLDHSRFVAKVSAWCLSNDRLYIPLSFARLNGLNKINSKKIYLQNEEGRSWKLVLRHDKSGTQTFVQSGWRRFCSENGIRQGQYTFKLVRKSAPPVIRLCRAKAKPKQRSVAEYSSDHSCFEGSVTPSSLRNDLLYLPRSFVNSNRLDKRCSEIVLKNEQGVKWPLVLKRFKSVTYLPKGWTSFCQVNRIKAGDSFKFKLVGTWKKPVLSLCPTQSNNHKTPLECSEGNKSEESEEDCLEVKKKKYWSRCRASVENMDDDQTNIGNSSRKKRVSKNPREKVESSSDHSSFVGSVNPSSLYKDQLYLPRNFVSSNFLDKRCSEIVLKNERGEKRTLVLKHFKKDLTFLKKGWTSFCQVNRIKAGDSFKFKLVGTWNKPVLSLCPTETNYHKTPLACSEGNKSEESEEEGTEDKNTSQDCLEVKKRKYWSTCRASAENIDDDQTNIGNSSKEKRVKKNPVKKAESSSDHSSFVANVTASSLNYDRLYLPLSFVSSNGLDKMNGKEIVLLNEEGLSWKFNLKYNQAGKHTYVRPGWSRFCDANGMSQGQQFTFKLVQKHGPPVMYLSLSEHRPKSESSSHRSYFVGSVTASSIKKDKLYLWKSFVSSNGLDKGCKKIILKNKWGREWKLVLKHYKSNCFTIIKRGWTSFCQGNGLKAGDSFKFKLVGTGEKPVLSLCPAESSHEKIPLECPEGIDDVNSLSSNPSSGDDSSRSEESEEENMEDKNISQDCLETKKRKYCSSSSYSQNRFVTLTLTRSAFQTYKLVSFFNNYASRLS

SEQ ID NO: 2110 - protein, 339 aa, Brassica napus
  misc_feature (117)..(117): Xaa can be any naturally occurring amino acid
  misc_feature (133)..(133): Xaa can be any naturally occurring amino acid
MVRPPCCDKGGVKKGPWTPEEDIILVTYIQEHGPGNWRAVPTNTGLLRCSKSCRLRWTNYLRPGIKRGNFTEHEEKMIVHLQALLGNRWAAIASYLPQRPDNDIKNYWNTHLKKKLXKASQDSHQELDQSKRXRSSISSSPSSSSANSNSYIPRGQWERRLQTDIHLAKKALSEALSPAVAPIVTSTLATTATTSSSSESRRSSSSTCGFLRVQETSTTYASSTENIAKLLKGWVKTSPKTQNSADQKNPPDSETKELMKSDDVQKDCAGGFQAFSGLDHSNDCDSPYHQTKLSPDHETKQAITGCSNQSQLSLFEKWLFEDFGGQIGDILLDENPNFF

SEQ ID NO: 2111 - protein, 646 aa, Petunia x hybrida
MSVMRRLSQKNWRDGCGRTVSSLSGSRKDRNLQPCKLLRSRTISKLVIRLGGKKMSRAQDGILKYMLKMMEVCNARGFVYGIIPDKGKPVSGASDNIRAWWKEKVKFDKNGPAAIAKYEAECLAREERVGSQNGNPQSVLQDLQDATLGSLLSSLMQHCDPPQRKYPLEKGVSPPWWPTGNEEWWAKTGLPKGQKPPYKKPHDLKKMWKVGVLTAVIKHMSPDIAKIRRLVRQSKCLQDKMTAKESSIWLAVLSREESILQQPGSENRSSSLEPPPRSRGEKKKPSSSSDSDYDVDGFDDGIGSVSSRDERRNQPLDVRPLNVVPPSHQSKEQGDGRYRRRKRARSNPTEQQIQPSLIHGDEHSNTILDINSSQTLFVGCITNESLLLNDKSEAPKRAENESESQPELPLQDSNLSFVPSANVVSIEDAYIGAGPSLNIMSQNSAVVPYESGMHLGSQDSAIQHQFQDTQFHGCHKVSGMNNGPQSSSLHYGTPNNGLHYGPHNSVVRTELQDSAFVHGSEYSNINQPPMYHSYSSAEFGSAHEETQSHLACNELQIRPINSGVGSSVLNGTGNDIIGDNHHYGKDIYQNNHDRQIEMPFPSPLTIGSPDYALGSPFNLGLDIQSHLDSPDYDLDFDKEFMSFFAS

SEQ ID NO: 2112 - protein, 267 aa, Zea mays
MDDGDLDFSNPDTYLCPALGTDPPSSCSMDSYFDEILKDTEHLACTHTHTCNPPVHDLSHTHTCVHVHTKIVAASPGDAESPSENNSNGNAASKKRPSGNRAAVRKYREKKKAHTASLEEEVVHLRALNQQLMKKLQSHAALEAEAARLRCLLVDIRGRIEGEIGAFPYQRPPAVKNVDLLSSVDQESLLGSAAAQVANSCDFRCNHQMYCNPGMQGAISGQVLGQGACDVASMQCIGSTKSGSTKLPVCGGLDTLPAVCLPNVEKK

SEQ ID NO: 2113 - protein, 263 aa, Glycine max
FSPRGKRKEKEKDEEVEDLSFDGSGLNYDSDDLTESNYNNVSEGNTGKNGGVSSNANSTVITGLDQKGKKKGMPAKNLMAERRRRKKLNDRLYMLRSVVPKISKMDRASILGDAIEYLKELLQRINDLHNELESTPVGSSLTPVSSFHPLTPTPPTLPSRIKEELCPSSLPSPNGQPARVEVRLREGRAVNIHMFCARKPSLLLSTMRALDNLGLDIQQAVISCFNGFAMDIFRAEQCKEGQDVHPEQIKAVLLDSAGYNGMM

SEQ ID NO: 2114 - protein, 344 aa, Arabidopsis thaliana
MADPVLQSPKNSHFFQPLLPGFDSYLNIPVKFFSKRIQGRNEGRTVELRTDASEKTWQVKIQGRRLTVGWKEFASAHDFRVGDIIVFRHEGSLVFHVTALGPSCCEIQYVPSCNNQENISNLSMKQSIKTELESSLDEDKVNMGKFPRKKHVKKRIPEAEAKSFSSDKSCFVAHVTDSNLREDTLFLPRKFDRSDGLIKGSNKIVLMNEEARTWTLILKFRNSKLKSVSTKDFNKIKRKESGDSSQKVPSSSSSVSEYRFLTLTVTPAALKDGRLRVPIKFIKGNRMENLGMKKITLLDKHGVEWPVNLVMYKGNTQTRFGSGLKEFFKANGIEACKSFVLELV

SEQ ID NO: 2115 - protein, 120 aa, Glycine max
EFGTRPILCFTGRQAQSNLSFSGVTGDSSAGDYQDCGASSMLLMGEPPWFAPCPENSLQSANRSNAVMRYKEKKLTRMFDKKVRYASRKARADVRRRVKGRFVKAGDVYDYDPLSTTRSF

SEQ ID NO: 2116 - protein, 201 aa, Oryza sativa (japonica cultivar-group)
MVRGKVQMRRIENPVHRQVTFCKRRGGLLKKARELSVLCDADVGVIIFSSQGKLHELATNGNMHNLVERYQSNVAGGQMEPGALQRQVAEQGIFLLREEIDLLQRGLRSTYGGGAGEMTLDKLHALEKGLELWIYQIRTTKMQMMQQEIQFLRNKEGILKEANEMLQEKVKEQQKLYMSLLDLHSQQPTQPMTYGNRFFSI

SEQ ID NO: 2117 - protein, 504 aa, Arabidopsis thaliana
  misc_feature (53)..(53): Xaa can be any naturally occurring amino acid
  misc_feature (62)..(62): Xaa can be any naturally occurring amino acid
MQTSQKHHSAAGLHMLYPQVYCSPQFQAKDNKGFSDIPSKENFFTLESSTASXITSGRSPFXPQGSQSCISDLHHSPDNVYGSPLSGVSSLAYDEAGVKSKIRELEVSLLSGDTKVEEFSGFSPAAGKSWNWDELLALTPQLDLKEVLVEAARAVADGDFATAYGFLDVLEQMVSVSGSPIQRLGTYMAEGLRARLEGSGSNIYKSLKCNEPTGRELMSYMSVLYEICPYWKFAYTTANVEILEAIAGETRVHIIDFQIAQGSQYMFLIQELAKHPGGPPLLRVTGVDDSQSTYARGGGLSLVGERLATLAQSCGVPFEFHDAIMSGCKVQREHLGLEPGFAVVVNFPYVLHHMPDESVSVENHRDRLLHLIKSLSPKLVTLVEQESNTNTSPFLSRFVETLDYYTAMFESIDAARPRDDKQRISAEQHCVARDIVNMIACEESERVERHEVLGNGGTSAAFAASEMLKAYDKNYKLGGHEGALYLFWKRRPMATCSVWKPNPN

SEQ ID NO: 2118 - protein, 348 aa, Glycine max
MMSGSPSPNSKQRTCDYCGDFTALLYCSADSAKLCFFCDRKVHSPNQLFSKHTRAQLCDSCGDSPASVLCSAENSVLCHNCDCEKHKHLASEVHQRKPLEGFSGCPSVTELLTILGLSEKSLLSNEGTSQIDYDLSDLHVWSAPSVNGLEYLITSTASSHKNRKSAFGRHKEEILSQLRELIKLEPDLIHGEVDAERQGQFGNLPTGFERDVEASMFPSYEAGVFCWHGESSDPTNQIVPSDTSSLRDFGEVVSAEDGSFTIPGTGTQANFNNEGKPSNSFNSENLSPTPKATPYELTSHERDSALLRYREKKKTRRYDKHIRYESRKVRAESRMRIKGRFVKDETQK

SEQ ID NO: 2119 - protein, 608 aa, Arabidopsis thaliana
METNSSGEDLVIKTRKPYTITKQRERWTEEEHNRFIEALRLYGRAWQKIEEHVATKTAVQIRSHAQKFFSKVEKEAEAKGVAMGQALDIAIPPPRPKRKPNNPYPRKTGSGTILMSKTGVNDGKESLGSEKVSHPEMANEDRQQSKPEEKTLQEDNCSDCFTHQYLSAASSMNKSCIETSNASTFREFLPSREEGSQNNRVRKESNSDLNAKSLENGNEQGPQTYPMHIPVLVPLGSSITSSLSHPPSEPDSHPHTVAGDYQSFPNHIMSTLLQTPALYTAATFASSFWPPDSSGGSPVPGNSPPNLAAMAAATVAAASAWWAANGLLPLCAPLSSGGFTSHPPSTFGPSCDVEYTKASTLQHGSVQSREQEHSEASKARSSLDSEDVENKSKPVCHEQPSATPESDAKGSDGAGDRKQVDRSSCGSNTPSSSDDVEADASERQEDGTNGEVKETNEDTNKPQTSESNARRSRISSNITDPWKSVSDEGRIAFQALFSREVLPQSFTYREEPREEDHHHQEQRYPMALDLNFTAQLTPVDDQEEKRNTGFLGIGLDASKLMSRGRTGFKPYKRCSMEAKESRILNNNPIIHVEQKDPKRMRLETQAST

SEQ ID NO: 2120 - protein, 206 aa, Michelia figo
  misc_feature (107)..(107): Xaa can be any naturally occurring amino acid
  misc_feature (204)..(204): Xaa can be any naturally occurring amino acid
VQLKRMENKINRQVTFSKRRNGLLKKAYELSVLCDAEVALIIFSSRGKLYEFGSAGTNKTLERYQRCCYTPQDVVVSDRETQGWYQEVSKLKAKYESLQRSQRHLLXEDLGPLSVKELQHLERQLEVALSQARQRKTQIMIEQMEELRKKERQLGDINKQLKIKLEAEGQGPFRCIQGSWESGAMVGNNTFSMNAPQAAPLDAXSP

SEQ ID NO: 2121 - protein, 235 aa, Oryza sativa (indica cultivar-group)
MAPRAATVEKVAVAPPTGLGLGVGGGVGAGGPHYRGVRKRPWGRYAAEIRDPAKKSRVWLGTYDTAEEAARAYDAAAREFRGAKAKTNFPFASQSMVGCGGSPSSNSTVDTGGGGVQTPMRAMPLPPTLDLDLFHRAAAVTAVAGTGVRFPFRGYPVARPATHPYFFYEQAAAVAAAEAGYRMMKLAPPVTVAAVAQSDSDSSSVVDLAPSPPAVTANKAAAFDLDLNRPPPVEN

SEQ ID NO: 2122 - protein, 303 aa, Oryza sativa (indica cultivar-group)
MLLNPASREVAALDSIRHHLLEEEEETPATAPAPTRRPVYCRSSSFGSLVADQWSESLPFRPNDAEDMVVYGALRDAFSSGWLPDGSFAAVKPESQDSYDGSSIGSFLASSSSEAGTPGEVTSTEATVTPGIREGEGEAVAVASRGKHYRGVRQRPWGKFAAEIRDPAKNGARVWLGTFDSAEEAAVAYDRAAYRMRGSRALLNFPLRIGSEIAAAAAAAAAGNKRPYPDPASSGSSSPSSSSSSSSSSSSGSPKRRKRGEAAAASMAMALVPPPPPPAQAPVQLALPAQPWFAAGPIQQLVS

SEQ ID NO: 2123 - protein, 239 aa, Phytolacca americana
  misc_feature (235)..(236): Xaa can be any naturally occurring amino acid
VQLRRMENKINRQVTFSKRRSGLVKKAHEISVLCDAELALIIFSPRGKLFEYSTDSSMEKILERYERYFYAERQLASNDPNTEVNWTFDFAKLKAKLELLQRNHRHYLGQDLDSLNIKDLQSLEQQLDNALKHIRTRKNQLMHESISELHKKEKAMQEQNNMLVKKIKEREKAMAEAQGMQWQRQQNEPPEASNFLLPPPLTSWNTAGDAYHGQIAGEVKRNDLDLTLEPVYSCXXGCF

SEQ ID NO: 2124 - protein, 133 aa, Glycine max
  misc_feature (45)..(45): Xaa can be any naturally occurring amino acid
IDWLFLVRDDRIFSEMLRRAREADLGTVVVGDWDKALGRHADLWXPWSGVENGEVGDLLPKRRRENSRRREQGEEHGFGLEDDDGGVFLNEDEELGQEFMLLYSEDEDEDVDVEDYYDDDDDDEEEEDGFYIL

SEQ ID NO: 2125 - protein, 387 aa, Oryza sativa
MSSFAHHHHGSLVEKDGRMSALRSSLRPYEAAEEMAAAAAAGGPAAAWGAVERGAGMMGDGFSVEDLLDLEELCEVDRDGGEQGEAAAAAATAVEKERSSDSHGSSVVSYEPMPLLPPVMDLPAHDVEELEWVSRIMDDSLAELPLPQLPAAAAALAACGKPQHRRPHEGAASALLDPMRTPTICALSTEALVPVKSRRSKRSRASVWSLSGAPLSDSTSSSSTATTSSCSSSASFSPFLQYVDFPALVASDLLDEQPRSKKSKHGKNGKQKPKKRGRKPKHQQPPHLAAAAGGGAALPATGDRRCSHCGVQKTPQWRAGPEGAKTLCNACGVRYKSGRLLPEYRPACSPTFVSSLHSNSHRKVLEMRRKKETPVIVAAAAPAVASF

SEQ ID NO: 2126 - protein, 227 aa, Nicotiana sylvestris
MAVKNKVSNGDLKGGNVKTNGVKEVHYRGVRKRPWGRYAAEIRDPGKKSRVWLGTFDTAEEAAKAYDTAAREFRGPKAKTNFPLPSENQSTSHSSTMESSSGETGIHAPPHAPLELDLTRRLGSVAADGGDNCRRSGEVGYPIFHQQPTVAVLPNGQPVLLFDSLWRPGVVNRPQPYHVMPMAMGFNGVNAGVDPTVSDSSSVVEENQYDGKRGIDLDLNLAPPTEF

SEQ ID NO: 2127 - protein, 237 aa, Nicotiana sylvestris
MYQPISTEFPVYHRTSSFSSLMPCLTDTWGDLPLKVDDSEDMVIYGLLSDALTTGWTPFNLTSTEIKAEPREEIEPATSPVPSVAPPAETTTAQAVVPKGRHYRGVRQRPWGKFAAEIRDPAKNGARVWLGTYETAEEAALAYDKAAYRMRGSKALLNFPHRIGLNEPEPVRLTVKRRSPEPASSSISPASENSLPKRRRKAVAAKQAELEVQSRSNVMQVGCQMEQFPVGEQLLVS

SEQ ID NO: 2128 - protein, 282 aa, Oryza sativa
MERMAKHYWALWGAGVRSGWPAAAHGGGAEPSWEEKAFAQDAAGHLGGCVWPPRSYTCSFCRREFRSAQALGGHMNVHRRDRARLRQCDDDDDDPIPPTVSICAPPPPPPPPPPLLPAAAAAPDSPSPPSLLLQISSPKSTTADHHQNHQQLQLQGTNSSPNSCIATIIKESRNKARLFITTMPAPAPATTHDLGLGGGKDDDDSISISMEEIRRKRRRVDQPLTPTPSYSSERERRREDDPAAADASNNKVIPSSSILVNQLAMDMVGRQEIDLELRLGST

SEQ ID NO: 2129 - protein, 259 aa, Triticum aestivum
  misc_feature (102)..(102): Xaa can be any naturally occurring amino acid
  misc_feature (166)..(166): Xaa can be any naturally occurring amino acid
  misc_feature (202)..(202): Xaa can be any naturally occurring amino acid
  misc_feature (206)..(206): Xaa can be any naturally occurring amino acid
  misc_feature (216)..(216): Xaa can be any naturally occurring amino acid
  misc_feature (223)..(223): Xaa can be any naturally occurring amino acid
  misc_feature (238)..(238): Xaa can be any naturally occurring amino acid
MDDGDLDFSNPEAYLCSDTGAGCSMDSYFDGILNDAEHLACTHTHTCNPPVDDSSHTHTCVHVHTKIVSASSDGGAADSPAENSGASKKRRPSGNRAAVRKXREKKKAHTALLEEEVVQLKALNKQLLKKLQNHAALEAEAARLRCLLVDVRGRIDGEIGAFPYQXRPVKNVDLVSGVDQGGFLGSAQVMNSCDFRCNDQMXCNPXNQMRTIGDDXAMSGKYXARHWGYANIKAWGCXSGSKAPSCGGMGQSFCCYNKH

SEQ ID NO: 2130 - protein, 53 aa, Lolium perenne
DNAMQRYKEKRKNRRYEKHIRYESRKLRADTRKRVKGRFVKSNEALNASSNGG

SEQ ID NO: 2131 - protein, 153 aa, Triticum aestivum
  misc_feature (40)..(40): Xaa can be any naturally occurring amino acid
  misc_feature (47)..(47): Xaa can be any naturally occurring amino acid
SEWTSLSLASIHVADLGKDLGRCEAFIYRRFDALRDGAGXAEEERHXVERQLLGAEIRNIVAVGGPKRTGEVRVERWGDELRRAGFRPVSLAGSPAAQARLLIGMYPWKGYTLVEEDGCLKLGWKDLSLLTASSWEPTEDDHAAVAEQKRHDS

SEQ ID NO: 2132 - protein, 194 aa, Yarrowia lipolytica CLIB122
MADSDSKPSSGNELELREQDKWLPIANVARIMKSALPENAKVSKEAKECMQECVSEFISFITSEASEKCAAEKRKTVNGEDILFAMLSLGFENYAEALKIYLTKYRQNQNYKQENRSENRKKKTLPAQEGAVAAAATGSNPVTETNSPSQQQQEEYYAAYDVPINGQDPTEQRFSEEPTQDEKAMYDAYTGDYY

SEQ ID NO: 2133 - protein, 203 aa, Zea mays
  misc_feature (163)..(163): Xaa can be any naturally occurring amino acid
MSLSLERSSSVVRDVATPAPPATSGASAPYPRAGAGASLSLPGAAAAHGHSQYLPLNEDDSLDMVLFDVLREASGSASTSAAAPATYQPPSSLPTLKALASGAARRGSRTAYAPKAATAGRHYRGVRRRPWGKYAAEIRDPARHGARLWLGTFATAEEAAAAXDRAAVRMRGAKALLNFPPAVAGCGSAATATAKQAGLTEAK

SEQ ID NO: 2134 - protein, 433 aa, Oryza sativa (japonica cultivar-group)
MNRGHISSSELIDAKLEERRISTAKHCPSCGNKLDCKPDWVGLPAGVKFDPTDQELIEHLEAKVREEGSRSHPLIDEFIPTIEGEDGICYTHPEKLPGVTRDGLSKHFFHRPSKAYTTGTRKRRKIQTECDVQKGETRWHKTGKTRPVMVSGRQKGCKKILVLYTNFGKHRKPEKTNWVMHQYHLGDLEEEKEGELVVCKIFYQTQPRQCSWSSDRGGGAAATASAVTTAAVQQDQQRRRDSGSGSCSSTRDHEVSATSYSTAGYAVAAAVEMQHLKHAADHFSFAPFRKSFEEVGISGDQVHSNQLGRSEQQHAGQEQQPHRPLLATTTAVPATAFLISRPTNPVSNIVPPAMQHASVVLDHDQFHVPAILLHHDKFQQQQQKLDRRSAGLEELIMGCTSSSTKGEASIPHSQETEWPYQPYWTPDNQDHHG

SEQ ID NO: 2135 - protein, 226 aa, Phytolacca americana
GLVKKAHEISILCDADVALIVFSTKGKLFQYATGSCMEKILERYERYSYAERQLITPDPESHLSWTLEHAKLKARVEILQKNQRNYMGEELDTLSLKELQTLEHQLDSALKQIRSKKNQLMYESISQLQKKDKALQEQNKSLSKEVKEKEKEKEKTMTQQAQWDNQNQDINSSSCLMSDQALPSLNIGMNYQTESGSSSVENEAIQQQNRNNTTIALMPHWMLSHL

SEQ ID NO: 2136 - protein, 238 aa, Pachysandra terminalis
VQLRRMENKINRQVTFAKRRNGLLKKAYELSVLCDAEVALIIFSARGKLYEFCSSSSMQNTLERYQKCSYGPLEPSQPAKETQSSYLEYMRLKARVEGLQRSQRNLFGENLGPLSTKELEQLEHQLEMSLNQIRSTKTQFMLDQLSDLQRKEQMLQEANRSLKRKLEESNAENSLGPSWESGGHGVPFGHQPAQSEGFFQPLECNSTLQIGYNHVGADQMSITVPPQNVNGFVPGWMV

SEQ ID NO: 2137 - protein, 197 aa, Thellungiella halophila
MGRKKLEIKRIENKSSRQVTFSKRRNGLIEKARQLSVLCDASVALLVVSASGKLYSFSSGDNLVKILDRYGKQHADDLKALDLQSKALSYGSHHELLELVESQLVDSSVDNASVDSLAQLEDHLETALSVTRARKTELMLKLVDSLKEKEKLLKRENQVLASQMEKNQHVGAEADNMEMSPGQISDSNLPVTLPLLN

SEQ ID NO: 2138 - protein, 304 aa, Glycine max
EFGSSGAGAESGDLKGETAPVDGLLNWQNARLKAEILTHPLYEQLLSAHVACLRIATPVDQLPRIDAQLAQSQNVVAKYSAFGQAIVGDDKELDQFLSHYVLLLCSFKEQLQQHVRVHAMEAVMACWEIEQSLQSLTGVSPGEGTGATMSDDEDEQVDSDANLFDGALDGPDSMGFGPLIPTENERSLMERVRHELKHELKQGYKDKIVDIREEILRKRRAGKLPGDTTSVLKAWWQSHSKWPYPTEEDKARLVQETGLQLKQINNWFINQRKRNWHSSPSTSTVLKSKRKRSNAGLNSADQYT

SEQ ID NO: 2139 - protein, 238 aa, Peperomia caperata
  misc_feature (207)..(207): Xaa can be any naturally occurring amino acid
  misc_feature (238)..(238): Xaa can be any naturally occurring amino acid
VQLKRMENKINRQVTFSKRRTGLLKKAHEISVLCDAEVALIVFSTKGKLYEYATNSSSMPGILDRYERHSFTDKEFFIKEGEPPEGAWTLEYAKLKARYELLQKNYRHYLGEDLGSLSGKELQQLEGQLDASLKNVRSRRTQALFHTISDLQKKEKSLLEQNSVMIKKLQDLEKAEKAQQSQLEMQNHERTQNQPPLILLPPPALSXGSFRQENGPSVEGEAAPRVAQKNSLLPPWMX

SEQ ID NO: 2140 - protein, 164 aa, Glycine max
DRQCALAEIWAILTVVCETHSLPLAQTWVPCKHRSVLAHGGGHKKSCSSFDGCCMGQVCMSITEVAFYVIDAHTWGFHEACVEHHLQQGQGVAGRAFLSHNMCFCGNIAQFCKTEYPLVHYALMFGLTSCFAVCLQSSHTGNDDYVPDRFRPPGATDFNEQIDC

SEQ ID NO: 2141 - protein, 938 aa, Oryza sativa (japonica cultivar-group)
MEVDPSSSLPGAGEGGGGGIGGGGGDLWPFDSLTTSLLFSSVSASPQPLPASSSSWLTPPSPLWLFDERQLLPLDMGAPAAPATAPPAEAAAVVEEVHRTRSGNSDTTSKRVDQINSKWQFHLSIDDNTDSSCLFKERLTQALRYFKESTDQHLLVQVWAPVKSGDRYVLTTSGQPFVLDQQSIGLLQYRAVSMMYMFSVDGENAGELGLPGRVYKQKVPEWTPNVQYYSSTEYPRLNHAISYNVHGTVALPVFDPSVQNCIAVVELIMTSKKINYAGEVDKVCKALEAVNLKSTEILDHPNVQICNEGRQSALVEILEILTVVCEEHKLPLAQTWVPCKYRSVLAHGGGVKKSCLSFDGSCMGEVCMSTSDVAFHVIDAHMWGFRDACVEHHLQKGQGVSGKAFIYRRPCFSKDISQFCKLEYPLVHYARMFGLAGCFAICLQSMYTGDDDYILEFFLPPNCRNEDDQNALLESILARMKKCLRTLKVVGNGDTNEVCLQISNVLIIETEDLKTNVHFENSEGCFRESPESNGSQRVHEVDNDGNKVSIMSERHLLADDNSQNNGASVGRPNGSGASDSLHKSNKPPERRRGKAEKTISLDVLQQYFSGSLKNAAKSLGVCPTTMKRICRQHGISRWPSRKINKVNRSLSKLKQVIESVQGSDAAFNLTSITGPLPIPVGPSSDSQNLEKASPNKVAELSNLAVEGDRDSSLQKPIENDNLAILMSQQGFIDANNNLQLEADKASHSRSSSGEGSINSRTSEASCHGSPANQTFVCKPIASTFAEPQLIPEAFTKEPFQEPALPLSRMLIEDSGSSKDLKNLFTSAVDQPFLARSSNLALMQNSGTVTIKASFKEDIVRFRFPCSGSVTALKDEVAKRLRMDVGMFDIKYLDDDHEWVKLACNADLEECMEISGSHVIRLLVSDVAAHLGSSCGSSG

SEQ ID NO: 2142 - protein, 475 aa, Medicago truncatula
MERYTLPLPSQQVHNTLTIPWTEPQQQESPSSWSTPNSEPKHNHEQDIAIAIAMAGSSLPFFKPEPQPEPDNNFYNNNNVVNVNNVIPLPDNFLMHQNTNTIDSISNPHSFFHNNNNYFFNNNNTNNPFEMGFENGFFMGNNNTSTSPVFMGGSLSASEFPPSLELDAAPVPPFSASFSMPLELAQPQPQQHHHQQQQQQPTTLFQKRRGALEIPRLETVGNKKKRKVEKSWEEEGSGGGGGDDVDDFSELNYDSDENGNDLNNSNGTVVTGGDQKGKKKKGLPAKNLMAERRRRKKLNDRLYMLRSVVPKISKMDRASILGDAVDYLKELLQRINNLHNELESTPPGSLLQPSASASFHPLTPTPPTLPCRVKEDLYPGDLLSPKNQSPKVEVRVREGRAVNIHMFCTRRPGLLLSTMRALDNLGLDVQQAVISCFNGFALDVFRAEQCREGQDVLPEQIKAVLLDSAGYHGLN

SEQ ID NO: 2143 - protein, 171 aa, Antirrhinum majus
MDPNMQNMMSSYLKIKKLVGDEGSDFEEEEEGEDEEEEEQERVVKVNFAESQLKKKKLNLGEGSGGKSGEKHTASGGGVVAQPCCLVENCGADLRNCKKYYQRHRVCEVHAKAPVVSVEGLMQRFCQQCSRFHDLSEFDQTKRSCRRRLAGHNERRRKSSLESHKEGRSPR

SEQ ID NO: 2144 - protein, 394 aa, Oryza sativa
MDGRESTVASGSNFSSFYVQHRGIGVPGGSGHPAGLHGPPPGGYRQHLDAVSAGYPFQPPHIGGSHIGQGYHHVDASAPVAQHGSGGGGGGMDIGMGVEMSADAKGDQGSGAGQDEPVKKKRGRPRKYKPDGAVTLGLSPSSSTPHSSTSAMGTMVTTPGSGFGSGAGSGGSGSGALTEKRGRGRPPGSGKMQQLASLGKWFLGSVGTGFTPHVIIISPGEDVAARIMSFSQQGPRAVCIISATGAVSTATLHQDSNSGGVVTYEGRFEILCLSGSYLVIEEGGSRTRSGGLCIALCGPDHRVIGGSVGGVLTAAGTVQVIVGSFMYGGTKKNKAKAEQETENNEEPIGGEEETPTMALPDHNMPHHTMGGWSAGLMRQMDSRTPNIDINSIRE

SEQ ID NO: 2145 - protein, 243 aa, Triticum aestivum
  misc_feature (173)..(173): Xaa can be any naturally occurring amino acid
MVQSKKKFRGVRQRHWGSWVSEIRHPLLKRRVWLGTFETAEEAARAYDEAAILMSGRNAKTNFPVPRSANGEIIVAPAAARDGRGVGSSSSGAAGASSLSQILSAKLRKCCKTPSPSLTCLRLDTEKSHIGVWQKRAGARADSSWVMTVELNKEPATAAAAPTPKRQHGVGDXPSSSTSTSTTGSPPEALEDEERIALQMIQELLNRSTPASPVNGLVHGEKGTSSSEKIIARLESLSGYLPD

SEQ ID NO: 2146 - protein, 453 aa, Zea mays
MLQGVLSRAPATDAAAAMKAKRAGASPGEEEEGDGRSARGKRQQLLGLGPATALASAAAAEEGPETRGLRLLSLLLRCAEAVAMDQLTEARELLPEIAELASPFGSSPERVAAYFGDALCARVLSSYLGAYSPLALRPLAAAQSRRVAVAFQAYNALSPLVKFSHFTANQAILQALDGEDCLHVIDLDIMQGLQWPGLFHILASRPRKPRSLRITGLGASLDVLEATGRRLADFAASLGLPFEFRPIEGKIGHVADAAALLGSRQRRRDDEATVVHWMHHCLYDVTGSDVGTVRLLRSLRPKLITIVEQDLGHSGDFLGRFVEALHYYSALFDALGDGAGAAEEESAERYAVERQLLGAEIRNIVAVGGPKRTGEVRVERWSHELRHAGFRPVSLAGSPAAQARLLLGMYPWKGYTLVEEDACLKLGWKDLSLLTASAWEPADDAVAASAPTG

SEQ ID NO: 2147 - protein, 204 aa, Arabidopsis thaliana
MNGGAWMWNPNKIEELEDDDESWEVKAFEQDTKGNISGTTWPPRSYTCNFCRREFRSAQALGGHMNVHRRDRASSRAHQGSTVAAAARSGHGGMLLNSCAPPLPTTTLIIQSTASNIEGLSHFYQLQNPSGIFGNSGDMVNLYGTTSFPPSNLPFSMLNSPVEVPPRLIEYSTGDDESIGSMKEATGTSVDELDLELRLGHHPP

SEQ ID NO: 2148 - protein, 388 aa, Picea mariana
MGRAPCCAKVGLNKGAWSAEEDSLLGKYIQTHGEGNWRSLPKKAGLRRCGKSCRLRWLNYLRPCIKRGNITADEEELIIRMHALLGNRWSIIAGRVPGRTDNEIKNYWNTNLSKKLAVRGIDPKTHKKVTTDSINRASDRFNQRKGGKLYDCSQRSQRLERNVARAGQSTGLVIPNVHNLKADLKGQYIAGPRAIQSSNSIRSSSPINTLIQPKSNELTDDPDFMQPQPVVSSEAGKQTDDSTVYCSSDSAASCALIDHLSSADDDQYLSLEGNSNECYSHTVAEESGTLKSSNPQTHSEAICDSRERDNGGPVQKHDQFPEYDVLSFFDVRNAENEICCNDDQWVHEQEMPQLHSWDNQIDDQGKEHFGSHVNNDVTAMSWEASFWF

SEQ ID NO: 2149 - protein, 427 aa, Oryza sativa
FFDGIFYGKGDDEEENGRFLSLCLLGFWNFGNLWFLLCVYVGAFWTEKDGKMDALKSSCRSEEAADEGAAAAPSAWGMVERDGFSVEDLLDLEEFCEAEKDAAEENEQALALVAAPEEEKSKDDSQPSSVVTYELVAPPPPPPEIVDLPAHDVEELEWVSRIMDDSLSELPPPPQPPASVVASLAARPPQPRQLQRRPQDGAYRALPPASYPVRTPTICALSTEALVPVKAKRSKRSRATAWSLSGAPPFSDSTSSSSTTTTSSCSSSASFSSFSPLLKFEWHPLGGTSDLPDDHLLPPGKKSKHGKNGKNKPKKRGRKPKQLPPHPSGAAASAPAPGDRRCSHCGVQKTPQWRAGPEGAKTLCNACGVRYKSGRLLPEYRPACSPTFVSAIHSNSHRKVLEMRRKKEVGSGLLTAAAAAAPAVASF

SEQ ID NO: 2150 - protein, 259 aa, Brassica oleracea var. botrytis
MGRGRVEMKRIENKINRQVTFSKRRNGLLKKAYELSVLCDAEVALIVFSSRGKLYEFGSVGVERTIERYHRCYNCSVTNNRPEESKQNWCQEVAKLKAKYESLVRTNRHLLGEDIGEMGVKQLQALERQLEAALTATRQRKTQVMMEEMEDLRKKERQLGDINKQLKIKFEAGGHAFKSFQDFWPNSAASMAGDPNNSKFPVQPSHPDSVDCNTEPFLQIGLVLVYIRFQQHYYVQGEGSSVPKSNVACETNFVQDWFL

SEQ ID NO: 2151 - protein, 359 aa, Arabidopsis thaliana
MDSNNHLYDPNPTGSGLLRFRSAPSSVLAAFVDDDKIGFDSDRLLSRFVTSNGVNGDLGSPKFEDKSPVSLTNTSVSYAATLPPPPQLEPSSFLGLPPHYPRQSKGIMNSVGLDQFLGINNHHTKPVESNLLRQSSSPAGMFTNLSDQNGYGSMRNLMNYEEDEESPSNSNGLRRHCSLSSRPPSSLGMLSQIPEIAPETNFPYSHWNDPSSFIDNLSSLKREAEDDGKLFLGAQNGESGNRMQLLSHHLSLPKSSSTASDMVSVDKYLQLQDSVPCKIRAKRGCATHPRSIAERVRRTRISERMRKLQELVPNMDKQTNTSDMLDLAVDYIKDLQRQYKILNDNRANCKCMNKEKKSI

SEQ ID NO: 2152 - protein, 447 aa, Magnaporthe grisea
MSTLAMAAPSPHAPFKKEYFSNWDDRRQADYAPSRPRSDPERIALPSIRQAFPDLLRLRVIPQDGQTSTPSSTTSPISGPPGTLTPPEYVHSPTSQNKRRRLSFGDDQEERVSQVPRLYTSQSQAYQRRDNRPLSPVTLSGGPRSSTSDSWAGSSRTSPFLPGTSTSTLRSPAAIEQNDPMDRQRPTLPSLPHLNFDRSPMESQSHMHHHHQQHPHQQQQQQHSHHVRAMSGDEYMMEQHRGMVQQHPHSAVEPGYRQPAPSGYPYPYHHPSRSQSLSIGAMPPMDRMPFSPSGYSAYHGDYMRMGDMGGMGFNGDNKQRKRRGNLPKETTDKLRAWFLAHLSHPYPTEDEKQELMRQTGLQMNQISNWFINARRRQLPAMINNARAESDALAQGRGLSDGSKILLSTERSDYDSDKRGSPISDDGASHLYHDDMHRRAVGMKRGSV

SEQ ID NO: 2153 - protein, 209 aa, Oryza sativa
  misc_feature (204)..(204): Xaa can be any naturally occurring amino acid
MARGKVQLRRIENPVHRQVTFCKRRAGLLKKARELSILCEADIGIIIFSAHGKLYDLATTGTMEELIERYKSASGEQANACGDQRMDPKQEAMVLKQEINLLQKGLRYIYGNRANEHMTVEELNALERYLEIWMYNIRSAKEGMLKAANEILQEKIVEQNGLIDVGMMVADQQNGHFSTVPLLEEITNPLTILSGYSTCRGSEXGLFLL

SEQ ID NO: 2154 - protein, 280 aa, Zea mays
  misc_feature (36)..(36): Xaa can be any naturally occurring amino acid
MDDGDLDFSNPDTYLCPALGTDPPSSCSMDSYSARXFDEILKDTEHHACTHTHTCNPPVHDLSHTHTCVHVHTKIVAASPGDDTADSPSENNTNGSGGNGSNAASKKRPSGNRAAVRKYREKKKAHTASLEEEVVHLRALNQQLVKKLQSHAALEAEVARLRCLLVDIRGRIEGEIGAFPYQRPPPAAKNVDLVSGVDQGGFLAGAAAQVTSSCDFRCNDQMYCSPGMQGAVSGQVLGQGACDVSSIQCVGSTRSASTKLPVCGGMDAVPAACLPNVQNK

SEQ ID NO: 2155 - protein, 716 aa, Zea mays; identical to SEQ ID NO: 116

SEQ ID NO: 2156 - protein, 244 aa, Lycopersicon esculentum
MYQLPTSTELTFFPAEFPVYCRSSSFSSLMPCLTESWGDLPLKVNDSEDMVIYGFLQDAFSIGWTPSNLTSEEVKLEPREEIEPAMSTSVSPPTVAPAALQPKGRHYRGVRQRPWGKFAAEIRDPAKNGARVWLGTYESAEEAALAYGKAAFRMRGTKALLNFPHRIGLNEPEPVRVTVKRRLSESASSSVSSASESGSPKRRRKGVAAKQAELEVESRGPNVMKVGCQMFQLASSYWLVKIWS

SEQ ID NO: 2157 - protein, 264 aa, Zea mays
MDFSGEIDDFSLQLIREQLLGGEASLPIVTNAAAYSASVVHHPTQAEFHQPAAFLPQPSHVAYVDLTNEYAADATVASAGGEAAFRAEPVMIRFGGEPSPVSDPSRRPLLTISLPPASHAWGPAAVPLEAPGAAALDANDFRKYRGVRQRPWGKFAAEIRDPKKRGSRVWLGTYDTAIEAARAYDRAAFRMRGAKAILNFPNEVGTRGADFLAPPPPPPQAAATPRPRPGPEPEPSQPSPSRPRRPGRRRRRCLPRQRPPRPRR

SEQ ID NO: 2158 - protein, 372 aa, Arabidopsis thaliana
MGYMCDFCGEQRSMVYCRSDAACLCLSCDRSVHSANALSKRHSRTLVCERCNAQPATVRCVEERVSLCQNCDWSGHNNSNNNNSSSSSTSPQQHKRQTISCYSGCPSSSELASIWSFCLDLAGQSICEQELGMMNIDDDGPTDKKTCNEDKKDVLVGSSSIPETSSVPQGKSSSAKDVGMCEDDFYGNLGMDEVDMALENYEELFGTAFNPSEELFGHGGIDSLFHKHQTAPEGGNSVQPAGSNDSFMSSKTEPIICFASKPAHSNISFSGVTGESSAGDFQECGASSSIQLSGEPPWYPPTLQDNNACSHSVTRNNAVMRYKEKKKARKFDKRVRYASRKARADVRRRVKGRFVKAGEAYDYDPLTPTRSY

SEQ ID NO: 2159 - protein, 215 aa, Papaver nudicaule
  misc_feature (36)..(36): Xaa can be any naturally occurring amino acid
  misc_feature (168)..(168): Xaa can be any naturally occurring amino acid
RHEMSMLCDAEVALIIFSNRGKLYEFCSSNSMFKTXERYQKCNYGQPEPNVSARESLEHASHQEYLKLKARVEALQRSQRNLLGEDLGPLSGKELEFLEKQLDSSLKQIRSTRTQYMLDQLTDLQRREQMLSDANKTLRRRLEEGAQASQQQWDMQHGVGYSRQQQSXHHQAADHNQGFFHPLECEPTLQIGYQQDQITVAQGAPMGSYMPGWLA

SEQ ID NO: 2160 - protein, 219 aa, Papaver nudicaule
EMSVLCDAEVALIVFSTKGKLFEYSTDSGMDRILERYERYSYAERELVTTEIDQGNWSLEYSKLKSKIEILQKNQRHFMGEDLQSLSLKELQNLEQQLDVALKQIRSRKNQLMYESISELQKKEKALQEQNNKLGKQLKEKEKEVAAQQQQASQWDQQVTQGQSSPSFLLSQSLPNLNIGNGSYQVRGGNNGNEEEIRTQTTRTNTATPMPHWMVNHLR

SEQ ID NO: 2161 - protein, 158 aa, Arabidopsis thaliana
GRLGLEITELRLGLPGDIVVSGESISGKKRASPEVEIDLKCEPAKKSQVVGWPPVCSYRRKNSLERTKSSYVKVSVDGAAFLRKIDLEMYKCYQDLASALQILFGCYINFDDTLKESECVPIYEDKDGDWMLAGDVPWEMFLGSCKRLRIMKRSCNRG

SEQ ID NO: 2162 - protein, 234 aa, Lycopersicon esculentum
MDQQLPPTNFPVDFPVYRRNSSFSRLIPCLTEKWGDLPLKVDDSEDMVIYGLLKDALSVGWSPFNFTAGEVKSEPREEIESSPEFSPSPAETTAAPAAETPKGRHYRGVRQRPWGKFAAEIRDPAKNGARVWLGTYETAEEAAIAYDKAAYRMRGSKAHLNFPHRIGLNEPEPVRVTAKRRASPEPASSSGNGSMKRRRKAVQKCDGEMASRSSVMQVGCQIEQLTGVHQLLVI

SEQ ID NO: 2163 - protein, 95 aa, Narcissus pseudonarcissus
KQKIKEITLKLVQHGQLSETNVYNWFQNRRARSKRKQATVLPNNNEPEAEAEFDSPPSERIVKSNDNNIELSSDSKSPISPDQMSLYENMLCSPS

SEQ ID NO: 2164 - protein, 351 aa, Zinnia elegans
MPPPLLGVEGDGLGNVSLMTSASTMESIFQKNAELTERNYLGLSDCSSFDSTAVSGISEVKRNNLNLKATELRLGLPGSQSPERDVDVDLVNSESLDEKPLFPLLPSKDGICSNSQKVFVSGNKRGFSDAIDEGKWMFGSSGTDSETSNMNGKISSGAQPVMIKDATSKVVTQEQTHATFGTNLNIVNTSNPPAAKAQVVGWPPVRSFRKNILATNSKTNDEVDGKPGPGALFVKVSMDGAPYLRKVDLRSYSTYQQLSSAIEKMFSCFTIGQCGSQGAPGRESLSESKLRDLLHGSEYVLTYEDKDGDWMLVGDVPWDMFIGSCKRLKIMKGSDAIGLAPRAMEKSKNRN

SEQ ID NO: 2165 - protein, 594 aa, Fagus sylvatica
MELMLVDDALGDSSDLEIDDLRCDNIADKDVSDEEIEAEELERRMWKDRIKLKRLKERQKIAAQQAAEKQKPKQTTDQAPRKKMSRAQDGILKYMLKLMEVCKARGFVYGIIPEKGKPVSGASDNIRAWWKEKVRFDKNGPAAITKYEAECLAMSEAENNRNGNSQSILQDLQDATLGSLLSSLMQHCDPPQRKYPLEKGVPPPWWPTGNEDWWVKLGLPHGQRPPYKKPHDLKKMWKVGVLTAVIKHMSPDIAKIRRHVRQSKCLQDKMTAKESAIWLGVLSREEALIRQPSSDNGTSGVTDMPRGGRDENKRAAVSSDSDYDVDGVDDGVSSVPSTDERRNQPMDVEPSDNLQNNTPVQDKAPGEKQPKRKRARVRSNCADQIPAPSHNEPLNVEPIITLPDVNHTDVQVGFQIHGDQQETGKIAALRLREKDFDVQPQLPVSEFNHFSALPADNVISTQSMYVDGRPLLYPVVQNTEMHHGDNYNFYNPSMEYGLTHDRQQSLIVMNEPQIRPEEVGLHVPTLHGSSTELYVKDPFNNEQHRPVDSQFGSAIDSLSLDCGGLNSPFHYDIDGLSSLEDFLHDEDLIQYFGA

SEQ ID NO: 2166 - protein, 183 aa, Eucalyptus grandis
MGRGRVELKRIENKINRQVTFAKRRNGLLKKAYELSVLCDAEVGLIIFSNRGKLYEFCSSSSMLKTLERYQKCNYGALEPNVSARESLELSCQQEYLRLKARYEGLQRTQRNLLGEELGQLCSKELESLERQLDGSLKQIRSRRTQYMLDQVTDLQHREQVVHEANRTLNQRLMEGYQVMRSS

SEQ ID NO: 2167 - DNA, 838 bp, Hordeum vulgare
catcgattttaaaaaaaagttcatacctttcaaaaacgttcatcaatttttttaaaaagttcactaaaaatgaaaaaaagttcatccaatttaaaaaaagttcattaattttttataaatttcaataaatttgaaaaaacttcataaaattcaacaaaagttcattgaagtgaaaaaagctcataaatctttaaaaagtgcatccattttcaaaaagatgttcatcaaaattcaatatagttcaccaatattcaaaaaagttcattaatcttaaaaaatattcgctaaaatttaaaaaatgtttatcaatatttaaacggcgtctagatgagccggtctatttacaaacaccataggcgccaattaacaaaaatgcacgttagatcacgtctacggcgtcaaataggaaatgcccatcggccttactattaagagttgttttggttatcctttaggatttatgctgtgggctggacttaacacaaaacccacagccatggtaggccggaatctattattcagctcacaaacgatgttctactcaaaagaagaaaaaaatctgttgtcagaaaaagagaacaaaaaaggctcacgaacatgccgcggctcgcacaggtggccgtgagcttctgaatgacttggccacccggcatgtccactgcccccctagacggtgtgggtgggtggacaggtcaagcgcattgaacaaggtcaccctgcgttctgccacgaggccaactgcgtggccctcatgcaacgcgccttgctgccacttctacacacgccctcgccggccgaccgctgctataaaagcagctccccgttgcgtcctcgacgg

SEQ ID NO: 2168 - DNA, 613 bp, Cauliflower mosaic virus
ggtccgatgtgagacttttcaacaaagggtaatatccggaaacctcctcggattccattgcccagctatctgtcactttattgtgaagatagtggaaaaggaaggtggctcctacaaatgccatcattgcgataaaggaaaggccatcgttgaagatgcctctgccgacagtggtcccaaagatggacccccacccacgaggagcatcgtggaaaaagaagacgttccaaccacgtcttcaaagcaagtggattgatgtgatggtccgattgagacttttcaacaaagggtaatatccggaaacctcctcggattccattgcccagctatctgtcactttattgtgaagatagtggaaaaggaaggtggctcctacaaatgccatcattgcgataaaggaaaggccatcgttgaagatgcctctgccgacagtggtcccaaagatggacccccacccacgaggagcatcgtggaaaaagaagacgttccaaccacgtcttcaaagcaagtggattgatgtgatatctccactgacgtaagggatgacgcacaatcccactatccttcgcaagacccttcctctatataaggaagttcatttcatttggagagg

SEQ ID NO: 2169 - DNA, 844 bp, Oryza sativa
ctcgaggtcattcatatgcttgagaagagagtcgggatagtccaaaataaaacaaaggtaagattacctggtcaaaagtgaaaacatcagttaaaaggtggtataaagtaaaatatcggtaataaaaggtggcccaaagtgaaatttactcttttctactattataaaaattgaggatgtttttgtcggtactttgatacgtcatttttgtatgaattggtttttaagtttattcgcttttggaaatgcatatctgtatttgagtcgggttttaagttcgtttgcttttgtaaatacagagggatttgtataagaaatatctttaaaaaaacccatatgctaatttgacataatttttgagaaaaatatatattcaggcgaattctcacaatgaacaataataagattaaaatagctttcccccgttgcagcgcatgggtattttttctagtaaaaataaaagataaacttagactcaaaacatttacaaaaacaacccctaaagttcctaaagcccaaagtgctatccacgatccatagcaagcccagcccaacccaacccaacccaacccaccccagtccagccaactggacaatagtctccacacccccccactatcaccgtgagttgtccgcacgcaccgcacgtctcgcagccaaaaaaaaaaaaagaaagaaaaaaaagaaaaagaaaaaacagcaggtgggtccgggtcgtgggggccggaaacgcgaggaggatcgcgagccagcgacgaggccggccctccctccgcttccaaagaaacgccccccatcgccactatatacatacccccccctctcctcccatccccccaaccct

SEQ ID NO: 2170 - DNA, 816 bp, Zea mays
cagatccacgctcgctcgggtgtcgggtcagatcgatccagttggcgcacgtaataatccttttccccagaaggagtcgaacccctcctccccgtccaatccaatcaaagcgaccaatcgactggctgtcctacacacacacaaaaccgaccgaggcgacacaccgcagcagtgatcattctgagcatttgcagaaaaaggagaacgtcccgaaatcctggtggttgtattgtgtgattgctcactcagtccgtgcagggtcagggtgaagccaagccaacaacccaacgctcgctgggagtagggtccaccggatttattggcagtacatcgctgtttggtcctcctgcccttcgcttattttttaattcggcagacgtgcacagacagggcaccaccggaccaaggaagggcgcacaccgtcgtcagtcaccaggtgggtgtgatcagcagccgcttctcttgtgctgctttatagcgtatgaaattccagtgtccctgttccacctgcatgcaattggtttgactgaacaacatgatagcaagtgatactatatatatttttatagaggaacacagtgaaaaaatatttagtattattacgtgcatgaaattgtattcacagttatccctgatgcaacgcaattgttcaatatatagcagtatatattatacgaagtatatatgtatatctaattttatgagaccgggagaaggtgtattcacagtacagtgcagggccatggccatgcagcccttggggcctgaaaagggtcgcgtgaagtggccaacgctgtgcaattgcaaccaaacaaa

SEQ ID NO: 2171 - DNA, 1180 bp, Zea mays
acttaaaaatcaacaatatcttcacatgacttaattataatgtcttgcttgagacgttgtttttgctactacataagataaagttcaaataaatgcatggtggagttcagcctaggcaaagtgatggtccgaatgattaacaccccaagcaagacattataagtcatgtgaagatctgcaagacgtgctaagagtctctgacacaccaacaagtggaagcccgaacaaacaaaaacgaagccatcaaagttgagataaagaggtggataaattgaaaattgtctcatgattttggatatactcaaatcgacatgacttcatctctaaactatagaacttttgatttgcttttcaaaaagtccaagatcaacaaaacgtgttggtgggtgcgggtttggttcttaacccaataggttttttctcgtgtgtatgaaaaggttgtacccatgtgtgaccgagccagacaggggtacgggcaaaccgaagggaaaccacttaggtggatcccttggctagcctgagactgacacaccataagtgatcggccgcttttaactacgcctggtgccgagccacaatagagatgtcggtctgtctcccacttatgacctacgaacccctcgtactatggctcatctatgggtcgtgtgccccttggcttactgcgcactcatgccctatcaaggctaggccagagtgcgtaggccgctttcagagatcactcggtgaaaaaatcactcggtgatgaaaccggcgaactgtcgttgggtgggtgggtcttactatcaaagaaaacgtattccagcaaacgtattccactctccacaaaataaacatttctgttcggttacctaggtgaggcatcctgtaagaacttggctgtgtttagtcacagcaaacgtataccactctccacaaaataaaataaaaaacgggtcagtgaagctgcaattaatcccttctcttgcttgctggttgctgccagggaaatggcattagtgtttgttcccgttccgaagaccgcagcaacccccggaatcggaaacgcctgccccctgcagcaccaaagaccgtaccaacccccgcaatcgcagttcgcaaaccaaactaatttgtgtacacaaaccggccccgtctcggttctattctataaaacccccgccagaccgctggcttgttc

SEQ ID NO: 2172 - DNA, 1650 bp, Oryza sativa
tccctcctccgttctataaaaaaccaacctactatcggatgtgacacatcctaatactatgaatctggatatacatcatactaaaatatgttatatccggttctagattcgtttttatggaacggagggagtattctgtcatcagctatcactgctctgcctgaacttgtctgagctattactactgtagtatatgaatttatgaagtggagtctcgtaacaaaaatacgagtatactccgtactgtactacccttatcaggattcaaggatactaggagtatagcattaccagatcaggcacttagatgtggccatccaaagagtaatggtaatagcctaataggagtaccatctactattgatctttcaaaaaaaaaagtactagtatagacgtagtatccagctagagctgcttaacagggtcagaatttgtccaaacagagcttgtaatgcacactgacgaagtcgatccgatcgaatcagagtcaacatttaaagagtactatttcgaagtaaaactgttcagttcttacaagattacatgtgaatttgcaagacttggacatgagtgttcatctcgtagtttaatgatgggtacccaacctgcaacaacagtgctttaaattgtacaagcagggggtaccaacagagtaatttgcacatgcagtcctgaacctgatgccattgcgaaacacacaaccctatacggtgcagatgcaagggagcccaattcagtcccagccattatctgtattgccgtacttccgcagggaaagttaccctctcatctgatctaccattgcatacatctcaaaaggaagtgagtaaaaaagaaaacaggaccaatcttcagagataagtttttgaaacctatcttcagagataagttcactcggcgataggagaggacctgatttggactcaaatcaggtgttgacgaatagagtagcaagagttttttcgacgggtcaagacctcaagggtcttaacagttgaactaactcggttatgatttggacacttggtgattaactactgataatagtactacttattgttattggcttgttacatcattcggtgctcaaaaatcagatgcaaatttagatgggacagacagcagctactagcaacataagagaattatgttcagtgtatcatgcatgactaaactctgaacgtactcacctggatccagatgcgagcagtacagtacctgtgcacattgcttgtgtattactccacttaattacgaactctattattttcctccgataatgcccgcagaacaaggttgtcactgaaaaatggtcctctccagagtccaggagctataggaggagtatgatactccttagcaatcatatactcatatgacatatccaaattgacaccggggttaagccgttaaccgtcactacgagttgcacttgtataaacaaaaaacaagggagaaaaccttgtgtcccccccatgatgcagaaatctaataagagcagcccaacgcttccggttggtggcggtagaccggcctctttaaactaccccatccgccccagatttatcaattactcctcgtcatctcgtctcgtctccgccaccgtgcgcgcgtcccctatattagaccccccaaccgggcaccggacac

SEQ ID NO: 2173 - DNA, 1456 bp, Zea mays
tgtttggactccagaaaatttacgggagttggtggagcaggtcattaagtactataaaaaatcatgtagctgaagctgcaagtatttagaagacatttagataagttattttatttatcatttagattaagaaaatttaaaactatttaaattgatattataaactacagctccacactggagctagatcctggagtcattacaaacacccccttaatgggaaaagagaagataatgtatatctaattattgtttctgtgtcacctatagctattagttcaaaacttcataatcactggtacaaataagctctagagaggcggttcggaacccatttttattgttgtttttcaaaaccactagtgttagggaccgccagtggaaactgaaacgccattggaaattgattttcactgatggtgagctaagaaaaccgccattggtaatcctttgcagaaaacataaactaggttttaaaaatagtaaacaaatatttttattaggagaggccccacatagtcgcaccatttttcgcgcattattcacgcgctacgcaaccaatggtaattgaacctcagagacttcactcttgtgtagcctcctttgccactccactaaacacttacttgtgtcttgattgcattttgttgcccacatattagaacaaacagagtgtaaattgattgtttgaggctgtaaacaaattcaaatgaaaaagtagtcaactactaaattgaataattgtttatgttctaccacttttattttggtacttttcccatcggaggcggtttgtaaaatttgcattttaagttttacaaatttcaatgaaattttgagagcccaaatgatttcaaataaaaaagttgtcaactacaatgttttataacttttaatttggtggttttttaaacaagctcatttgaaaaactaaaatgatcgattctacatgatttttaggtcgattttttaaggaatcgcctgtacaaatatttctactgacagtttttaagaaaccacctgtggaaatcatagatttgtactagcggtttttctcaagtaactgctagtagaaatatggtggttttcttaagaaaactgtttgtaggaatgcacgatttatataaatggatttgttaagaaaaccgctagtggaatgttctttcaactaacggttattgagtcgtgacagccaatttaatttccttgataactaaaagcggctgtaaaaattagaccatgatgtaggcacggagctgttttgtactgaatgcgcccactgttttgttggaaaagtgcatgtacttattattcattctgtttatttctagctggcattcagttcttacagccacagattatgcaaaacgcctatttctgccagcaaatttacaggaaaagtcatggacttttccgggttattttcctataagtacagccattcctttcacttaca

SEQ ID NO: 2174 - DNA, 1160 bp, Zea mays
atgtgctggtgccccataaggtaggcacctaggtctgtgtttgaagcatcgacagatttgtaaacatgttcctatgaacctatttctgattgataatttgtcaaaactcatcatttgtcttcatccttgcctgcttgcgttcacgtgacaaagtacgtgtatgtcttcggcctttgctgtgtatgtttcgcattgcttagatgtggtgaaagaacatcagaagatgcattgatggcgtgcttaaaccagtgatgtgctccaggtgttcctgcagtctgcagagatatttactcttgtagtcttgttgacagcacagttgtatgtgatttcttggatgtaatgtaaaccaaatgaaagataggaacagttcgtcctcttccgtatacgaaggtcactgtatcatttgtcgtggcacaagatgatctgcaggcaggactgcaacatggtttcttggactgtcctgaatgcccgttcttgttctttagttgagccagagcagcagcctggtgtcggtgcctgagacctgacgaagcacacggcaaacaaacaagtcgcagcagctagcaggggcgttgccatcgccacaagcccccaagagacccgccgaggaaaagaaaaaaaaactacggccgccgttgccaagccgagcgtgcgaaccgatccacggatgggagatcagagatcacccaccgcaggcgggcggcagtggctggcgaggtgcgtccacagaacctgctgcaggtccctgtccgtcccggcgaccccttttctaggcgagcaactccccatggcagagctgcacgcagcagggcccgtcgttggttgcagctttaaccctttttgttttaaccatacaatgcagagtcgcagaggtgaaacaggacggaaattacagaaaagatggtggtgtgccagcagccccagcatgaagaagatcaggacaaaagaaaagcttgtgattggtgacagcaacaggattggattggagccaagctaggcagtgagaggcaggcagcaagacgcgtcagccactgaaatccagagggcaacctcggcctcacaactcatatccccttgtgctgttgcgcgccgtggttagccaggtgtgctgcaggcctcctccttgtttatatatgggagatgctctcaccctctaaggt

SEQ ID NO: 2175 - DNA, 469 bp, Zea mays
ggtactcctgagatactataccctcctgttttaaaatagttggcattatcgaattatcattttactttttaatgttttctcttcttttaatatattttatgaattttaatgtattttaaaatgttatgcagttcgctctggacttttctgctgcgcctacacttgggtgtactgggcctaaattcagcctgaccgaccgcctgcattgaataatggatgagcaccggtaaaatccgcgtacccaactttcgagaagaaccgagacgtggcgggccgggccaccgacgcacggcaccagcgactgcacacgtcccgccggcgtacgtgtacgtgctgttccctcactggccgcccaatccactcatgcatgcccacgtacacccctgccgtggcgcgcccagatcctaatcctttcgccgttctgcacttctgctgcctataaatggcggcatcgaccgtcacctgcttc

SEQ ID NO: 2176 - DNA, 1942 bp, Zea mays
atgtgctggtgccccataaggtaggcacctaggtctgtgtttgaagcatcgacagatttgtaaacatgttcctatgaacctatttctgattgataatttgtcaaaactcatcatttgtcttcatccttgcctgcttgcgttcacgtgacaaagtacgtgtatgtcttcggcctttgctgtgtatgtttcgcattgcttagatgtggtgaaagaacatcagaagatgcattgatggcgtgcttaaaccagtgatgtgctccaggtgttcctgcagtctgcagagatatttactcttgtagtcttgttgacagcacagttgtatgtgatttcttggatgtaatgtaaaccaaatgaaagataggaacagttcgtcctcttccgtatacgaaggtcactgtatcatttgtcgtggcacaagatgatctgcaggcaggactgcaacatggtttcttggactgtcctgaatgcccgttcttgttctttagttgagccagagcagcagcctggtgtcggtgcctgagacctgacgaagcacacggcaaacaaacaagtcgcagcagctagcaggggcgttgccatcgccacaagcccccaagagacccgccgaggaaaagaaaaaaaaactacggccgccgttgccaagccgagcgtgcgaaccgatccacggatgggagatcagagatcacccaccgcaggcgggcggcagtggctggcgaggtgcgtccacagaacctgctgcaggtccctgtccgtcccggcgaccccttttctaggcgagcaactccccatggcagagctgcacgcagcagggcccgtcgttggttgcagctttaaccctttttgttttaaccatacaatgcagagtcgcagaggtgaaacaggacggaaattacagaaaagatggtggtgtgccagcagccccagcatgaagaagatcaggacaaaagaaaagcttgtgattggtgacagcaacaggattggattggagccaagctaggcagtgagaggcaggcagcaagacgcgtcagccactgaaatccagagggcaacctcggcctcacaactcatatccccttgtgctgttgcgcgccgtggttagccaggtgtgctgcagggggtaccatggcatgcatcgatagatctcgagggatccaaagacatggaggtggaaggcctgacgtagatagagaagatgctcttagctttcattgtctttcttttgtagtcatctgatttacctctctcgtttatacaactggttttttaaacactccttaacttttcaaattgtctctttctttaccctagactagataattttaatggtgattttgctaatgtggcgccatgttagatagaggtaaaatgaactagttaaaagctcagagtgataaatcaggctctcaaaaattcataaactgttttttaaatatccaaatatttttacatggaaaataataaaatttagtttagtattaaaaaattcagttgaatatagttttgtcttcaaaaattatgaaactgatcttaattatttttccttaaaaccgtgctctatctttgatgtctagtttgagacgattatataattttttttgtgcttaactacgacgagctgaagtacgtagaaatactagtggagtcgtgccgcgtgtgcctgtagccactcgtacgctacagcccaagcgctagagcccaagaggccggaggtggaaggcgtcgcggcactatagccactcgccgcaagagcccaagagaccggagctggaaggatgagggtctgggtgttcacgaattgcctggaggcaggaggctcgtcgtccggagccacaggcgtggagacgtccgggataaggtgagcagccgctgcgataggggcgcgtgtgaaccccgtcgcgccccacggatggtataagaataaaggcattccgcgtgcaggatt

SEQ ID NO: 2177 - DNA, 1186 bp, Artificial
  synthetic DNA
ctcgaggtcattcatatgcttgagaagagagtcgggatagtccaaaataaaacaaaggtaagattacctggtcaaaagtgaaaacatcagttaaaaggtggtataaagtaaaatatcggtaataaaaggtggcccaaagtgaaatttactcttttctactattataaaaattgaggatgtttttgtcggtactttgatacgtcatttttgtatgaattggtttttaagtttattcgcttttggaaatgcatatctgtatttgagtcgggttttaagttcgtttgcttttgtaaatacagagggatttgtataagaaatatctttagaaaaacccatatgctaatttgacataatttttgagaaaaatatatattcaggcgaattctcacaatgaacaataataagattaaaatagctttcccccgttgcagcgcatgggtattttttctagtaaaaataaaagataaacttagactcaaaacatttacaaaaacaacccctaaagttcctaaagcccaaagtgctatccacgatccatagcaagcccagcccaacccaacccaacccaacccaccccagtccagccaactggacaatagtctccacacccccccactatcaccgtgagttgtccgcacgcaccgcacgtctcgcagccaaaaaaaaaaagaaagaaaaaaaagaaaaagaaaaaacagcaggtgggtccgggtcgtgggggccggaaacgcgaggaggatcgcgagccagcgacgaggagcttaggcctcatcgttgaagatgcctctgccgacagtggtcccaaagatggacccccacccacgaggagcatcgtggaaaaagaagacgttccaaccacgtcttcaaagcaagtggattgatgtgatatctccactgacgtaagggatgacgcacaatcccactatccttcgaggcctcatcgttgaagatgcctctgccgacagtggtcccaaagatggacccccacccacgaggagcatcgtggaaaaagaagacgttccaaccacgtcttcaaagcaagtggattgatgtgatatctccactgacgtaagggatgacgcacaatcccactatccttcgaagctccctccctccgcttccaaagaaacgccccccatcgccactatatacatacccccccctctcctcccatccccccaaccct

SEQ ID NO: 2178 - DNA, 1528 bp, Zea mays
cacggctcacaataccagtcatctacatgtgataaattttatagttagattacttcttgtaatcatttcagaggatgaaaaaaaaatcgcaagaaagcaaatattttaaatgaatgatgcaatatacaaatttaattacacaattatgtaagattacattgtttagtttcatagaaatcaatttctagagtcataataatgcctaaattaaaattctattctatttttccttaagaaaaaaaacagcccattaaggaccattagaatgcgcgctgctccatttttttatatatagagatatgagttgttgctcactaggccactccacctcgcatgcgtgttctttattacatgaaaaaatgagccgctgcttttgcattaagggtctagagatgtacgagtgcaacgcttcgtattcactgcacgagtaatttttttttaatgcacggaggcgctttgtattcctcagcagctctgcgcgcccgtgcttcgtgtacggcagtgacgaggcagcagcagctctacgtgcccacgtgcctggctgcctgcccaccgtgatggcaaggcttgcttgcttgcgtgcctgcgtgtggcagcgacgaggttgaagctacggcggtggctgcttgcctgcgcgcgtgctagcacggcgacgacgtcgacgctgatgctagcgttgctacttttgtttttgttttctctgtgcttgcgatgatgcagtaaaataaacgtgtgtatctcatgtgattgatcgacgtgtgtcggcgatttcaaatcagtaacaatcacatgtgcatccccatcgacttcgtgtcggcgataaatctgctagggatttgtgcttttcatgtatgtgcttgaatagagaggaaagaataatattacataaaatatgagttcaacatctttcttaataccttttgctcgatctccttagtagagccacgtgcgtgataacgtgttaagaaccccttgctaccgagtgtagtccaagggctgcttaactgaataatagtagaacacaaggagacaagagtgtagagaggaactgattctttgttactatatggtgctgctctccaaaggttacatgatatggggatctcctctctatttatagacaaaactagggtttcaggcatatgggccacataggccttcctggcccaagaaaggtttcttaacactaccatcttccaggcgcggtcgtgcgtgcttcaactccttccctccgcctccagagcggataaatacggggtctacggtgcacgcgcacgcatggtgcgccgaggggcatctctgcccggggaatgcgcgcaggccatcgctcgacacgcacgtacgtgtcgcccccgcgaggcctcctcgcacacgcgtcgcgccgcacgggcgccgagggaccttgcaattcgtccgcgtcggtgcacacgtccctggtccggcttgccggctttgccctggcctcgcgcgcgacgtgccgcgtctccccaccggacggctataaaaaggcggcgccacctgatcctcc

SEQ ID NO: 2179 - DNA, 1421 bp, Arabidopsis thaliana
agttctaatgtgttactgtatcaaaaaaaatttggtattgttttctagacatgatataattttgtacttgtaattgattttagaaagatattttctataatgaaaaaaatcttataaaactttttaaaaagttaccaaattaggaaaatttctctataattaaaaaatattaatttatcgataaattaaaacctttttaaattaataaaattttgcagtcccaacattattaatttataaaggttttactgtacttcattttctaacctcagtatgttaaaagtcatgtatgtgtactaagaatcaaacctggcacgcaaacttttgctaattttgtcacatacagttaacatttagcattgtgcgagtagctccaccacattattatcaatcgtttggttcttcaacatgtcttatatatggatcaataatagtttaatatcatatcagtaatctttgttctcttgtcttgcatgtagaacatgtacatattgcttcgtcggcagcgaatgaagcctaaaattaaaatttggttttgtccattgatgatatgatggctcgttccacatgagagaatggttgagaaaactgaaaataatgaagaggatgagaaattataatgatcagacaagtgaagtgtttcattttatagcttagtgtagaaaacgattgcttgtgattgtgaatatatagttttagatgagttgtttttatagtaactttgagggaacaataaactatgatatagttatcatttttattttaaaacaagtaaattcatatgaatttctgatatattcatattttcactatgaatttaaacactataatcttatttcatattttagcatatgatattttgcatgatgctatcttagcctcgactatctttacttcatcttctaaactatatatttatcaaatcttacgtatgcattgcatcgcttgtttttacattttgtgtaaagaaaaagttgcattaattagtttttagcggtttagtacaatatggttaatttgataaccacatacttgatacctgttgtatctagagttgtatataacaaaattagaattatattctattggctaagccaatttctctccaccaatcagtttacatcggttatttggaacattattatcgataagcaatgtcattatccaaaattttggaatgttatcgtatgaagaagagtgtagaagtatcttgatcacatatgaatggcttacctcaatcctcaaaaaaaaaaaaaaacaatgattttccaaagcatatgtggtaataaataatgttataatcttcacttgaaaaaaaaaacaaatccattggcacagattagccatttgacgacaacctcataaacatattccacgtggaccaatcaaaatagaatcctcctaatcatcttcctcgtggc

SEQ ID NO: 2180 - DNA, 537 bp, Arabidopsis thaliana
actaaatctagccttttcagaccggacatgaacttcgcatattggcgtaactgtgcagttttacctttttcggatcagacaagatcagatttagaccacccaacaatagtcagtcatatttgacaacctaagctagccgacactactaaaaagcaaacaaaagaagaattctatgttgtcattttaccggtggcaagtggacccttctataaaagagtaaagagacagcctgtgtgtgtataatctctaattatgttcaccgacacaatcacacaaacccttctctaatcacacaacttcttcatgatttacgacattaattatcattaactctttaaattcactttacatgctcaaaaatatctaatttgcagcattaatttgagtaccgataactattattataatcgtcgtgattcgcaatcttcttcattagatgctgtcaagttgtactcgcacgcggtggtccagtgaagcaaatccaacggtttaaaaccttcttacatttctagatctaatctgaaccgtcagatatct

SEQ ID NO: 2181 - DNA, 1326 bp, Zea mays
gattggtagaatccgacgggttgatacccctgcaatcgtagcgtgatgagggtgtgaatgttgccgatgtgtggacttcgaggaaatgatagcccctggatgccgagatagccgaagtcgaggtggtcgtggtcgggagacacgcagcagtagcctattctttggtaggggtcgatgttcaagcgtcaacgatcggctgggcgacataaaaattagcaccagggtgaccttcttgcttcttcgatcgtctggacgtcgaggagccccgcggcagcgcacgcgtctgcaccgttatggtggccgcgctcgcgatggaatagaaggggtaatgatggatccggccaggaaggccacgacatcgacggatccaaccggcaagacggcgatccggttaaatagacgacggatctagctgggaaggtagactctatattaaatgaggttgtacatgccctaataactttataaatctaatttattcagaggcaaggtagtagtattatctttcccaacggatagttatctgatctgccgttcagcttgatcgataactttataaatctaatttattcagaggccggcggcagcgcacacgtctgcaccagtaatgttagccgcgcctgtggcgtaatagaaggggtaacgatggatccgaccagaaaggcctcgacatcgacggatccagacggcgatccggtcaaagagacgacgaatctagccgagaaggtagatctctcgagagagttcatattaaatgatgttgtacatgccataataactctataaatctaatttattcataggcgaaggtagtagtattatctttcccagcggatcgttatctgatctgccgttcagcttgatcgatccacgtcgtttgatctcggcgagcagcacatggcggctcttcttgtgtacaggtctcactctctgctacttcagtgcaaggcggagtgaacgcacacaataacgtgagtattgtgggaactacttgtagatgcaaacgatgtaaatccacctgctccaccaagtgcccgcccggctctatccattccattcgtcaacatgcaggttcagactggcccgtgctggaccagtgagcggtgccggtggaccccaatgcaagcgaagcgagtgaccatcggggaagcctcccgtgctgcccccacatggcttgcctgaatgcctctctctcgccgcagtgccctctctctctcctcctcctctccgtcgaagggcgtcacgagagcccagagggcatccgaggcccccaccccaccccttcctccgtgtatataagcagtggcagggtgagcgtctctcctc

SEQ ID NO: 2182 - DNA, 65 bp, Hordeum vulgare
catccatcgagagacgttcgcagcagcaaagagcacgcagcaactagctttcagttgtttcaacc

SEQ ID NO: 2183 - DNA, 80 bp, Oryza sativa
accaccaccaccaccaccacctccacctcctcccccctcgctgccggacgacgagctcctcccccctccccctccgccgc

SEQ ID NO: 2184 - DNA, 52 bp, Zea mays
gtgttggaagagaatagcctgaaggttcacagtaaccttcatctgtcggaag

SEQ ID NO: 2185 - DNA, 83 bp, Zea mays
cgtcgcctccgctgtccgctgcacagactgtagtaccggggcaggggcaggggcaggggcacaaacagagccacaccacacac

SEQ ID NO: 2186 - DNA, 177 bp, Oryza sativa
accatcaccaacacaccactgcaaacccatccgcctccgcaccgcatcgcacctacaaattgtgcacgctgcaccgctcaaaaaaaagaagaaactaaagtcgtacgtaggacgcggcgtgcgagcgttggtgcggtgcgcggcggcgcgcggggaagtagtgagagcatcgatcat

SEQ ID NO: 2187 - DNA, 46 bp, Zea mays
ggccccaacattagcacaaagaacacaatagaccactgatttaaca

SEQ ID NO: 2188 - DNA, 93 bp, Zea mays
aaggaaggagaagaagacgagtgtcaagtgaacctgaaacttgcggtgtcactggctggtagcctgagtgtgagtgagtgatcgagctagctg

SEQ ID NO: 2189 - DNA, 93 bp, Zea mays
accaccggcgagccacatcgagaacacgatcgagcacacaagcacgaagactcgtttaggagaaaccacaaaccaccaagccgtgcaagcacc

SEQ ID NO: 2190 - DNA, 9 bp, Cauliflower mosaic virus
acacgctga

SEQ ID NO: 2191 - DNA, 165 bp, Zea mays
cacccgttcgcctctcaccttttcgctgtactcactcgccacacacaccccctctccagctccgttggagctccggacagcagcaggcgcggggcggtcacgtagtaagcagctctcggctccctctccccttgctccatttgatagtgcaacccatcgagctac

SEQ ID NO: 2192 - DNA, 61 bp, Triticum aestivum
aaccatcttccacacactcaagccacactattggagaacacacagggacaacacaccataa

SEQ ID NO: 2193 - DNA, 119 bp, Zea mays
atctcacacaagcaaagcagcagcaacagccaacacctaaactaaagaacagtagtagtccctgtgtacgtctagcaacgatccgcgccgagctcgccagttttgctcgttagtttggg

SEQ ID NO: 2194 - DNA, 203 bp, Arabidopsis thaliana
aacttggccaatccgcatcgtgtggcgatcagagagttaagccttgaagacgaagagataacgaattggttgttgatcactcgctttataaatctctcagtttcttgctcacaccaacatctctctaagcttcttcttctaccaatctaattcctctcttcagcttcttgtgttgtgacgcatactcgtcgcagtcttgagat

SEQ ID NO: 2195 - DNA, 182 bp, Arabidopsis thaliana
agatctcattgtctgaacacagttagataaaactgggaataaatctggacgaaattacgatcttacaccaaccccctcgacgagctcgtatatataaagcttatacgctcctccttcaccttcgtactactactaccaccacatttctttagctcaaccttcattactaatctccttttaag

SEQ ID NO: 2196 - DNA, 78 bp, Zea mays
agaccaccactgcgccattggccagctagagccaaccagaagagcttgcagttactgagagtgtgtgagagagagagg

SEQ ID NO: 2197 - DNA, 804 bp, Zea mays
accgtcttcggtacgcgctcactccgccctctgcctttgttactgccacgtttctctgaatgctctcttgtgtggtgattgctgagagtggtttagctggatctagaattacactctgaaatcgtgttctgcctgtgctgattacttgccgtcctttgtagcagcaaaatatagggacatggtagtacgaaacgaagatagaacctacacagcaatacgagaaatgtgtaatttggtgcttagcggtatttatttaagcacatgttggtgttatagggcacttggattcagaagtttgctgttaatttaggcacaggcttcatactacatgggtcaatagtatagggattcatattataggcgatactataataatttgttcgtctgcagagcttattatttgccaaaattagatattcctattctgtttttgtttgtgtgctgttaaattgttaacgcctgaaggaataaatataaatgacgaaattttgatgtttatctctgctcctttattgtgaccataagtcaagatcagatgcacttgttttaaatattgttgtctgaagaaataagtactgacagtattttgatgcattgatctgcttgtttgttgtaacaaaatttaaaaataaagagtttcctttttgttgctctccttacctcctgatggtatctagtatctaccaactgacactatattgcttctctttacatacgtatcttgctcgatgccttctccctagtgttgaccagtgttactcacatagtctttgctcatttcattgtaatgcagataccaagcgg

SEQ ID NO: 2198 - DNA, 477 bp, Oryza sativa
cgccgcgccggtaaccaccccgcccctctcctctttctttctccgttttttttttccgtctcggtctcgatctttggccttggtagtttgggtgggcgagaggcggcttcgtgcgcgcccagatcggtgcgcgggaggggcgggatctcgcggctggggctctcgccggcgtggatccggcccggatctcgcggggaatggggctctcggatgtagatctgcgatccgccgttgttgggggagatgatggggggtttaaaatttccgccatgctaaacaagatcaggaagaggggaaaagggcactatggtttatatttttatatatttctgctgcttcgtcaggcttagatgtgctagatctttctttcttctttttgtgggtagaatttgaatccctcagcattgttcatcggtagtttttcttttcatgatttgtgacaaatgcagcctcgtgcggagcttttttgtaggtaga

SEQ ID NO: 2199 - DNA, 985 bp, Zea mays
gtgagagctcagtgcctcgtcccgcccgccccaaatctggttcttgtgctggctctggctgtgcgctgcacgaattctgcatctggttctttcgagacgcaattcccggaccgtgggctttggtttcggagggggccgagagtaaggcgttaggactttctccgagctgcaaggccgctcgtcgttgcggcatttttcgtttcgcttgtcctgtgatgagagatgtgcatttccctttggcgggcttaccgttccctgctcgtctgtatgtgtgtatgtttgtgtgacctttccctcaacgccaggctcttctcccctcttgctgtttctttcagcagtacagacgcgcatctgtacagcgcctttcttcggtcctgggttatgattgatccgttaacagttggtcaccaagtgctggctgtttaatatgtactataagcttcttggtgccgctgcctctgcctatacgactttatgcgctgcctgcacaagtctcagccatctgtgggaacgtgtgtctctcacctacctttcatattgcactagctggattgaatcattctgctttggagagatgtccggtcatttttttttaaatcattttcatctcgcgtactagtttttgttttgttttgcgagagagtaatttttttttaatatttactgtctcctgtcccatttgctgtttctttacccagaaatttccaccagattcagtcaaacgaaactcctgtgctcttttttttctccctttcaaaagggtgtgtaaccgactaccgactcagataatataagtgcggtcacatatcacatgatatcatctcgcctctctcccttctcctgtgttttattttccttttttctaaccacagcgtgatgaacttcttttttttttgggggggggggggggggtaactacagcttagcgaacatgaatgggtagttttacaactaatgcaacggctggttcactgaacaactgtag

SEQ ID NO: 2200 - DNA, 208 bp, Arabidopsis thaliana
gtaagttcacttttcttcgattcatactttctcaagattcctgcatttctttagaatttgaaccaagtgtcgatttttgtttgagagaagtgttgatttatagatctggttattgaatctagattccaatttttaattgattcgagtttgttaagtgcgtttatactacttctcattgatcttgtttgatttctctgctctgtattag

SEQ ID NO: 2201 - protein, 237 aa, artificial
  consensus
  Misc_feature (1)..(1): location 1 can be a Gap or Met
  Misc_feature (2)..(2): location 2 can be a Gap or Ser
  Misc_feature (3)..(3): location 3 can be a Gap or Ser
  Misc_feature (4)..(4): location 4 can be a Gap or Arg or Met
  Misc_feature (5)..(5): location 5 can be a Gap or Ser
  Misc_feature (6)..(6): location 6 can be a Gap or Ala or Ser or Gly
  Misc_feature (7)..(7): location 7 can be a Gap or Ser or Gly
  Misc_feature (8)..(8): location 8 can be a Gap or Ser
  Misc_feature (9)..(9): location 9 can be a Gap or Pro or Ser
  Misc_feature (10)..(10): location 10 can be a Gap or Arg or Ser
  Misc_feature (11)..(11): location 11 can be Asn or a Gap or Arg
  Misc_feature (12)..(12): location 12 can be a Gap or Ser
  Misc_feature (13)..(13): location 13 can be a Gap or Asn or Ser or Thr
  Misc_feature (14)..(14): location 14 can be a Gap or Ser
  Misc_feature (15)..(15): location 15 can be a Gap or Val or Pro
  Misc_feature (16)..(16): location 16 can be a Gap or Asn or Ser
  Misc_feature (17)..(17): location 17 can be Met or Ser
  Misc_feature (18)..(18): location 18 can be Ile or Asp or Lys or Ala or Met
  Misc_feature (19)..(19): location 19 can be Ser
  Misc_feature (20)..(20): location 20 can be Glu or Gln
  Misc_feature (21)..(21): location 21 can be Trp
  Misc_feature (22)..(22): location 22 can be Ile or Ser
  Misc_feature (23)..(23): location 23 can be Lys or Gln or Arg
  Misc_feature (24)..(24): location 24 can be Lys or Glu
  Misc_feature (25)..(25): location 25 can be Glu
  Misc_feature (26)..(26): location 26 can be Asn
  Misc_feature (27)..(27): location 27 can be Lys
  Misc_feature (28)..(28): location 28 can be Leu or Met
  Misc_feature (29)..(29): location 29 can be Phe
  Misc_feature (30)..(30): location 30 can be Glu
  Misc_feature (31)..(31): location 31 can be Glu or Gln
  Misc_feature (32)..(32): location 32 can be Ala
  Misc_feature (33)..(33): location 33 can be Ile or Leu
  Misc_feature (34)..(34): location 34 can be Ala
  Misc_feature (35)..(35): location 35 can be Tyr
  Misc_feature (36)..(36): location 36 can be Tyr
  Misc_feature (37)..(37): location 37 can be Gly
  Misc_feature (38)..(38): location 38 can be Val or Glu or Met
  Misc_feature (39)..(39): location 39 can be Asp or Ser or Gly
  Misc_feature (40)..(40): location 40 can be Ala or Thr
  Misc_feature (41)..(41): location 41 can be Pro or Ser
  Misc_feature (42)..(42): location 42 can be Asn or Asp
  Misc_feature (43)..(43): location 43 can be Leu or Arg
  Misc_feature (44)..(44): location 44 can be Trp or Phe or Cys
  Misc_feature (45)..(45): location 45 can be Asp or Glu or His
  Misc_feature (46)..(46): location 46 can be Lys
  Misc_feature (47)..(47): location 47 can be Val
  Misc_feature (48)..(48): location 48 can be Ala or Ser
  Misc_feature (49)..(49): location 49 can be Ser or Arg
  Misc_feature (50)..(50): location 50 can be Ala
  Misc_feature (51)..(51): location 51 can be Met
  Misc_feature (52)..(52): location 52 can be Gly
  Misc_feature (53)..(53): location 53 can be Gly
  Misc_feature (54)..(54): location 54 can be Ile or Thr
  Misc_feature (55)..(55): location 55 can be Lys
  Misc_feature (56)..(56): location 56 can be Ser or Thr
  Misc_feature (57)..(57): location 57 can be Ala or Thr
  Misc_feature (58)..(58): location 58 can be Asp or Glu
  Misc_feature (59)..(59): location 59 can be Glu
  Misc_feature (60)..(60): location 60 can be Ile or Val
  Misc_feature (61)..(61): location 61 can be Arg
  Misc_feature (62)..(62): location 62 can be Leu or Arg or Cys
  Misc_feature (63)..(63): location 63 can be His
  Misc_feature (64)..(64): location 64 can be Tyr or Phe
  Misc_feature (65)..(65): location 65 can be Glu or Gln
  Misc_feature (66)..(66): location 66 can be Asn or Ile or Asp or Leu or Phe
  Misc_feature (67)..(67): location 67 can be Leu
  Misc_feature (68)..(68): location 68 can be Val or Asp or Glu or Thr
  Misc_feature (69)..(69): location 69 can be Tyr or Asp
  Misc_feature (70)..(70): location 70 can be Asp
  Misc_feature (71)..(71): location 71 can be Ile or Val or Leu
  Misc_feature (72)..(72): location 72 can be Asn or Asp or Lys
  Misc_feature (73)..(73): location 73 can be Asn or Leu or Ser or Met or Thr
  Misc_feature (74)..(74): location 74 can be Ile
  Misc_feature (75)..(75): location 75 can be Glu
  Misc_feature (76)..(76): location 76 can be Ala or His or Ser
  Misc_feature (77)..(77): location 77 can be Arg or Gly
  Misc_feature (78)..(78): location 78 can be Asn or Arg or His
  Misc_feature (79)..(79): location 79 can be Ile or Val
  Misc_feature (80)..(80): location 80 can be Gln or Pro
  Misc_feature (81)..(81): location 81 can be Tyr or Phe
  Misc_feature (82)..(82): location 82 can be Pro
  Misc_feature (83)..(83): location 83 can be Asn or Lys
  Misc_feature (84)..(84): location 84 can be Tyr or Gly
  Misc_feature (85)..(85): location 85 can be Asn or Lys or Met or Gly
  Misc_feature (86)..(86): location 86 can be His or Ser or Thr
  Misc_feature (87)..(87): location 87 can be Ile or Asp or Gln or Arg or His
  Misc_feature (88)..(88): location 88 can be a Gap or Ala or Gly
  Misc_feature (89)..(89): location 89 can be a Gap or Tyr or Ala or Pro or Phe
  Misc_feature (90)..(90): location 90 can be a Gap or Trp or Phe
  Misc_feature (91)..(91): location 91 can be Asn or a Gap or Cys or Thr
  Misc_feature (92)..(92): location 92 can be a Gap or Asp or Lys or Arg
  Misc_feature (93)..(93): location 93 can be a Gap or Tyr or Gly
  Misc_feature (94)..(94): location 94 can be a Gap or Trp or Lys
  Misc_feature (95)..(95): location 95 can be a Gap or Val or Phe
  Misc_feature (96)..(96): location 96 can be a Gap or Ala or His
  Misc_feature (97)..(97): location 97 can be a Gap or His or Gly
  Misc_feature (98)..(98): location 98 can be a Gap or Arg or Thr
  Misc_feature (99)..(99): location 99 can be a Gap or Leu or Ser
  Misc_feature (100)..(100): location 100 can be a Gap or Lys or Arg
  Misc_feature (101)..(101): location 101 can be a Gap or Asp or Ala
  Misc_feature (102)..(102): location 102 can be Asn or a Gap or Glu
  Misc_feature (103)..(103): location 103 can be a Gap or Trp or Ala
  Misc_feature (104)..(104): location 104 can be a Gap or Lys or Ala
  Misc_feature (105)..(105): location 105 can be a Gap or His or Gly
  Misc_feature (106)..(106): location 106 can be Ile or a Gap or Asp
  Misc_feature (107)..(107): location 107 can be a Gap or Arg or Thr
  Misc_feature (108)..(108): location 108 can be a Gap or Arg
  Misc_feature (109)..(109): location 109 can be a Gap or Trp
  Misc_feature (110)..(110): location 110 can be a Gap or Arg
  Misc_feature (111)..(111): location 111 can be a Gap or Trp
  Misc_feature (112)..(112): location 112 can be a Gap or Arg
  Misc_feature (113)..(113): location 113 can be a Gap or Trp
  Misc_feature (114)..(114): location 114 can be a Gap or Arg
  Misc_feature (115)..(115): location 115 can be a Gap or Trp
  Misc_feature (116)..(116): location 116 can be a Gap or Arg
  Misc_feature (117)..(117): location 117 can be a Gap or Cys
  Misc_feature (118)..(118): location 118 can be a Gap or Ala
  Misc_feature (119)..(119): location 119 can be a Gap or Pro
  Misc_feature (120)..(120): location 120 can be a Gap or Ser
  Misc_feature (121)..(121): location 121 can be a Gap or Pro
  Misc_feature (122)..(122): location 122 can be a Gap or Ala
  Misc_feature (123)..(123): location 123 can be a Gap or Ala
  Misc_feature (124)..(124): location 124 can be a Gap or Asp
  Misc_feature (125)..(125): location 125 can be a Gap or Ser
  Misc_feature (126)..(126): location 126 can be a Gap or Pro
  Misc_feature (127)..(127): location 127 can be a Gap or Leu
  Misc_feature (128)..(128): location 128 can be a Gap or Pro
  Misc_feature (129)..(129): location 129 can be a Gap or Gly
  Misc_feature (130)..(130): location 130 can be a Gap or Arg
  Misc_feature (131)..(131): location 131 can be a Gap or Leu
  Misc_feature (132)..(132): location 132 can be a Gap or Leu
  Misc_feature (133)..(133): location 133 can be a Gap or Ser
  Misc_feature (134)..(134): location 134 can be a Gap or Arg
  Misc_feature (135)..(135): location 135 can be a Gap or Pro
  Misc_feature (136)..(136): location 136 can be a Gap or Thr
  Misc_feature (137)..(137): location 137 can be a Gap or Thr
  Misc_feature (138)..(138): location 138 can be a Gap or Glu
  Misc_feature (139)..(139): location 139 can be a Gap or Arg
  Misc_feature (140)..(140): location 140 can be a Gap or Pro
  Misc_feature (141)..(141): location 141 can be a Gap or Arg
  Misc_feature (142)..(142): location 142 can be a Gap or Pro
  Misc_feature (143)..(143): location 143 can be a Gap or Asp
  Misc_feature (144)..(144): location 144 can be a Gap or Gly
  Misc_feature (145)..(145): location 145 can be a Gap or Leu
  Misc_feature (146)..(146): location 146 can be Ile or a Gap
  Misc_feature (147)..(147): location 147 can be a Gap or Ser
  Misc_feature (148)..(148): location 148 can be a Gap or Pro
  Misc_feature (149)..(149): location 149 can be Asn or a Gap
  Misc_feature (150)..(150): location 150 can be a Gap or Gly
  Misc_feature (151)..(151): location 151 can be a Gap or Pro
  Misc_feature (152)..(152): location 152 can be a Gap or Tyr
  Misc_feature (153)..(153): location 153 can be a Gap or Thr
  Misc_feature (154)..(154): location 154 can be a Gap or Phe
  Misc_feature (155)..(155): location 155 can be a Gap or Thr
  Misc_feature (156)..(156): location 156 can be a Gap or Gly
  Misc_feature (157)..(157): location 157 can be a Gap or Arg
  Misc_feature (158)..(158): location 158 can be a Gap or Pro
  Misc_feature (159)..(159): location 159 can be a Gap or Ala
  Misc_feature (160)..(160): location 160 can be a Gap or Ser
  Misc_feature (161)..(161): location 161 can be a Gap or Leu
  Misc_feature (162)..(162): location 162 can be a Gap or Asp
  Misc_feature (163)..(163): location 163 can be a Gap or His
  Misc_feature (164)..(164): location 164 can be a Gap or Arg
  Misc_feature (165)..(165): location 165 can be a Gap or Met
  Misc_feature (166)..(166): location 166 can be a Gap or Gly
  Misc_feature (167)..(167): location 167 can be a Gap or His
  Misc_feature (168)..(168): location 168 can be a Gap or Val
  Misc_feature (169)..(169): location 169 can be a Gap or Ala
  Misc_feature (170)..(170): location 170 can be a Gap or Gly
  Misc_feature (171)..(171): location 171 can be a Gap or Pro
  Misc_feature (172)..(172): location 172 can be a Gap or Ala
  Misc_feature (173)..(173): location 173 can be a Gap or Lys
  Misc_feature (174)..(174): location 174 can be a Gap or Leu
  Misc_feature (175)..(175): location 175 can be a Gap or Gly
  Misc_feature (176)..(176): location 176 can be a Gap or Asp
  Misc_feature (177)..(177): location 177 can be a Gap or Gly
  Misc_feature (178)..(178): location 178 can be a Gap or Asp
  Misc_feature (179)..(179): location 179 can be a Gap or Lys
  Misc_feature (180)..(180): location 180 can be a Gap or Ser
  Misc_feature (181)..(181): location 181 can be a Gap or Ser
  Misc_feature (182)..(182): location 182 can be a Gap or Ser
  Misc_feature (183)..(183): location 183 can be a Gap or Lys
  Misc_feature (184)..(184): location 184 can be a Gap or Asp
  Misc_feature (185)..(185): location 185 can be a Gap or Ala
  Misc_feature (186)..(186): location 186 can be a Gap or Met
  Misc_feature (187)..(187): location 187 can be a Gap or Gly
  Misc_feature (188)..(188): location 188 can be a Gap or Arg
  Misc_feature (189)..(189): location 189 can be a Gap or Gly
  Misc_feature (190)..(190): location 190 can be a Gap or Ala
  Misc_feature (191)..(191): location 191 can be a Gap or Ser
  Misc_feature (192)..(192): location 192 can be a Gap or Leu
  Misc_feature (193)..(193): location 193 can be a Gap or Pro
  Misc_feature (194)..(194): location 194 can be a Gap or Thr
  Misc_feature (195)..(195): location 195 can be a Gap or Thr
  Misc_feature (196)..(196): location 196 can be a Gap or Leu
  Misc_feature (197)..(197): location 197 can be a Gap or Leu
  Misc_feature (198)..(198): location 198 can be a Gap or Val
  Misc_feature (199)..(199): location 199 can be a Gap or Arg
  Misc_feature (200)..(200): location 200 can be a Gap or Trp
  Misc_feature (201)..(201): location 201 can be a Gap or Ala
  Misc_feature (202)..(202): location 202 can be a Gap or Val
  Misc_feature (203)..(203): location 203 can be a Gap or Thr
  Misc_feature (204)..(204): location 204 can be a Gap or Cys
  Misc_feature (205)..(205): location 205 can be a Gap or Thr
  Misc_feature (206)..(206): location 206 can be a Gap or Thr
  Misc_feature (207)..(207): location 207 can be a Gap or Thr
  Misc_feature (208)..(208): location 208 can be a Gap or Thr
  Misc_feature (209)..(209): location 209 can be a Gap or Thr
  Misc_feature (210)..(210): location 210 can be a Gap or Arg
  Misc_feature (211)..(211): location 211 can be a Gap or Arg
  Misc_feature (212)..(212): location 212 can be a Gap or Arg
  Misc_feature (213)..(213): location 213 can be Asn or a Gap
  Misc_feature (214)..(214): location 214 can be a Gap or Asp
  Misc_feature (215)..(215): location 215 can be a Gap or Gln
  Misc_feature (216)..(216): location 216 can be a Gap or Ala
  Misc_feature (217)..(217): location 217 can be a Gap or Tyr
  Misc_feature (218)..(218): location 218 can be a Gap or Ser
  Misc_feature (219)..(219): location 219 can be a Gap or Arg
  Misc_feature (220)..(220): location 220 can be a Gap or Gly
  Misc_feature (221)..(221): location 221 can be a Gap or Ala
  Misc_feature (222)..(222): location 222 can be a Gap or Pro
  Misc_feature (223)..(223): location 223 can be a Gap or Tyr
  Misc_feature (224)..(224): location 224 can be a Gap or Arg
  Misc_feature (225)..(225): location 225 can be Ile or a Gap
  Misc_feature (226)..(226): location 226 can be a Gap or Pro
  Misc_feature (227)..(227): location 227 can be a Gap or Val
  Misc_feature (228)..(228): location 228 can be a Gap or Ala
  Misc_feature (229)..(229): location 229 can be a Gap or Leu
  Misc_feature (230)..(230): location 230 can be a Gap or Ala
  Misc_feature (231)..(231): location 231 can be Ile or a Gap
  Misc_feature (232)..(232): location 232 can be a Gap or Ala
  Misc_feature (233)..(233): location 233 can be Ile or a Gap
  Misc_feature (234)..(234): location 234 can be a Gap or Ala
  Misc_feature (235)..(235): location 235 can be Ile or a Gap
  Misc_feature (236)..(236): location 236 can be a Gap or Leu
  Misc_feature (237)..(237): location 237 can be a Gap or Gly
XXXMSXXXXXXSXSPXSXSEWSKKENKMFEEALAYYGXXAPNLWXKVXXAMGGTKSAXEVRXHXXXLXDDVXXIEXGRXPFPKYKTXGXWTXXXXXXXXXXXXXXXXXXXXXXXXXXXXXXXXXXXXXXXXXXXXXXXXXXXXXXXXXXXXXXXXXXXXXXXXXXXXXXXXXXXXXXXXXXXXXXXXXXXXXXXXXXXXXXXXXXXXXXXXXXXXXXXXXXXXXXXXXXXXXXXXXX

SEQ ID NO: 2202 - DNA, 11722 bp, artificial
  Synthetic construct pMON93039
cgcgcctgcctgcaggtactcgaggtcattcatatgcttgagaagagagtcgggatagtccaaaataaaacaaaggtaagattacctggtcaaaagtgaaaacatcagttaaaaggtggtataaagtaaaatatcggtaataaaaggtggcccaaagtgaaatttactcttttctactattataaaaattgaggatgtttttgtcggtactttgatacgtcatttttgtatgaattggtttttaagtttattcgcttttggaaatgcatatctgtatttgagtcgggttttaagttcgtttgcttttgtaaatacagagggatttgtataagaaatatctttagaaaaacccatatgctaatttgacataatttttgagaaaaatatatattcaggcgaattctcacaatgaacaataataagattaaaatagctttcccccgttgcagcgcatgggtattttttctagtaaaaataaaagataaacttagactcaaaacatttacaaaaacaacccctaaagttcctaaagcccaaagtgctatccacgatccatagcaagcccagcccaacccaacccaacccaacccaccccagtccagccaactggacaatagtctccacacccccccactatcaccgtgagttgtccgcacgcaccgcacgtctcgcagccaaaaaaaaaaagaaagaaaaaaaagaaaaagaaaaaacagcaggtgggtccgggtcgtgggggccggaaacgcgaggaggatcgcgagccagcgacgaggagcttaggcctcatcgttgaagatgcctctgccgacagtggtcccaaagatggacccccacccacgaggagcatcgtggaaaaagaagacgttccaaccacgtcttcaaagcaagtggattgatgtgatatctccactgacgtaagggatgacgcacaatcccactatccttcgaggcctcatcgttgaagatgcctctgccgacagtggtcccaaagatggacccccacccacgaggagcatcgtggaaaaagaagacgttccaaccacgtcttcaaagcaagtggattgatgtgatatctccactgacgtaagggatgacgcacaatcccactatccttcgaagctccctccctccgcttccaaagaaacgccccccatcgccactatatacatacccccccctctcctcccatccccccaacccttctagaaccatcttccacacactcaagccacactattggagaacacacagggacaacacaccataagatccaagggaggcctccgccgccgccggtaaccaccccgcccctctcctctttctttctccgtttttttttccgtctcggtctcgatctttggccttggtagtttgggtgggcgagaggcggcttcgtgcgcgcccagatcggtgcgcgggaggggcgggatctcgcggctggggctctcgccggcgtggatccggcccggatctcgcggggaatggggctctcggatgtagatctgcgatccgccgttgttgggggagatgatggggggtttaaaatttccgccgtgctaaacaagatcaggaagaggggaaaagggcactatggtttatatttttatatatttctgctgcttcgtcaggcttagatgtgctagatctttctttcttctttttgtgggtagaatttgaatccctcagcattgttcatcggtagtttttcttttcatgatttgtgacaaatgcagcctcgtgcggagcttttttgtaggtagaagcggaccggtcgcgcctcagcagtcgctgtcgttaacccagcggtactcgctgaggcgatcgcgggcccggtaccctgcaatgtgaccctagacttgtccatcttctggattggccaacttaattaatgtatgaaataaaaggatgcacacatagtgacatgctaatcactataatgtgggcatcaaagttgtgtgttatgtgtaattactaattatctgaataagagaaagagatcatccatatttcttatcctaaatgaatgtcacgtgtctttataattctttgatgaaccagatgcattttattaaccaattccatatacatataaatattaatcatatataattaatatcaattgggttagcaaaacaaatctagtctaggtgtgttttgctaattattgggggatagtgcaaaaagaaatctacgttctcaataattcagatagaaaacttaataaagtgagataatttacatagattgcttttatcctttgatatatgtgaaaccatgcatgatataaggaaaatagatagagaaataattttttacatcgttgaatatgtaaacaatttaattcaagaagctaggaatataaatattgaggagtttatgattattattattattttgatgttcaatgaagttttttttaatttcatatgaagtatacaaaaattcttcatagatttttgtttctatgccgtagttatctttaatatatttgtggttgaagaaatttattgctagaaacgaatggattgtcaatttttttttaaagcaaatatatatgaaattatactgtatattattttagtcatgattaaaatgtggccttaattgaatcatctttctcattcattttttcaaaagcatatcaggatgattgatatttatctattttaaaaattaatttaagggttcaaattaaatttaacttaaaagtgtcctaaccgtagttaaaggtttactttaaaaaaatactatgaaaaatctaatcttctatgaatcgacctgcaggatttaaatccatcgttctggggcctaacgggccaagcttactcgaggtcattcatatgcttgagaagagagtcgggatagtccaaaataaaacaaaggtaagattacctggtcaaaagtgaaaacatcagttaaaaggtggtataaagtaaaatatcggtaataaaaggtggcccaaagtgaaatttactcttttctactattataaaaattgaggatgtttttgtcggtactttgatacgtcatttttgtatgaattggtttttaagtttattcgcttttggaaatgcatatctgtatttgagtcgggttttaagttcgtttgcttttgtaaatacagagggatttgtataagaaatatctttagaaaaacccatatgctaatttgacataatttttgagaaaaatatatattcaggcgaattctcacaatgaacaataataagattaaaatagctttcccccgttgcagcgcatgggtattttttctagtaaaaataaaagataaacttagactcaaaacatttacaaaaacaacccctaaagttcctaaagcccaaagtgctatccacgatccatagcaagcccagcccaacccaacccaacccaacccaccccagtccagccaactggacaatagtctccacacccccccactatcaccgtgagttgtccgcacgcaccgcacgtctcgcagccaaaaaaaaaaagaaagaaaaaaaagaaaaagaaaaaacagcaggtgggtccgggtcgtgggggccggaaacgcgaggaggatcgcgagccagcgacgaggccggccctccctccgcttccaaagaaacgccccccatcgccactatatacatacccccccctctcctcccatccccccaaccctaccaccaccaccaccaccacctccacctcctcccccctcgctgccggacgacgagctcctcccccctccccctccgccgccgccgcgccggtaaccaccccgcccctctcctctttctttctccgtttttttttccgtctcggtctcgatctttggccttggtagtttgggtgggcgagaggcggcttcgtgcgcgcccagatcggtgcgcgggaggggcgggatctcgcggctggggctctcgccggcgtggatccggcccggatctcgcggggaatggggctctcggatgtagatctgcgatccgccgttgttgggggagatgatggggggtttaaaatttccgccgtgctaaacaagatcaggaagaggggaaaagggcactatggtttatatttttatatatttctgctgcttcgtcaggcttagatgtgctagatctttctttcttctttttgtgggtagaatttgaatccctcagcattgttcatcggtagtttttcttttcatgatttgtgacaaatgcagcctcgtgcggagcttttttgtaggtagaagtgatcaaccatggcgcaagttagcagaatctgcaatggtgtgcagaacccatctcttatctccaatctctcgaaatccagtcaacgcaaatctcccttatcggtttctctgaagacgcagcagcatccacgagcttatccgatttcgtcgtcgtggggattgaagaagagtgggatgacgttaattggctctgagcttcgtcctcttaaggtcatgtcttctgtttccacggcgtgcatgcttcacggtgcaagcagccggcccgcaaccgcccgcaaatcctctggcctttccggaaccgtccgcattcccggcgacaagtcgatctcccaccggtccttcatgttcggcggtctcgcgagcggtgaaacgcgcatcaccggccttctggaaggcgaggacgtcatcaatacgggcaaggccatgcaggcgatgggcgcccgcatccgtaaggaaggcgacacctggatcatcgatggcgtcggcaatggcggcctcctggcgcctgaggcgccgctcgatttcggcaatgccgccacgggctgccgcctgacgatgggcctcgtcggggtctacgatttcgacagcaccttcatcggcgacgcctcgctcacaaagcgcccgatgggccgcgtgttgaacccgctgcgcgaaatgggcgtgcaggtgaaatcggaagacggtgaccgtcttcccgttaccttgcgcgggccgaagacgccgacgccgatcacctaccgcgtgccgatggcctccgcacaggtgaagtccgccgtgctgctcgccggcctcaacacgcccggcatcacgacggtcatcgagccgatcatgacgcgcgatcatacggaaaagatgctgcagggctttggcgccaaccttaccgtcgagacggatgcggacggcgtgcgcaccatccgcctggaaggccgcggcaagctcaccggccaagtcatcgacgtgccgggcgacccgtcctcgacggccttcccgctggttgcggccctgcttgttccgggctccgacgtcaccatcctcaacgtgctgatgaaccccacccgcaccggcctcatcctgacgctgcaggaaatgggcgccgacatcgaagtcatcaacccgcgccttgccggcggcgaagacgtggcggacctgcgcgttcgctcctccacgctgaagggcgtcacggtgccggaagaccgcgcgccttcgatgatcgacgaatatccgattctcgctgtcgccgccgccttcgcggaaggggcgaccgtgatgaacggtctggaagaactccgcgtcaaggaaagcgaccgcctctcggccgtcgccaatggcctcaagctcaatggcgtggattgcgatgagggcgagacgtcgctcgtcgtgcgtggccgccctgacggcaaggggctcggcaacgcctcgggcgccgccgtcgccacccatctcgatcaccgcatcgccatgagcttcctcgtcatgggcctcgtgtcggaaaaccctgtcacggtggacgatgccacgatgatcgccacgagcttcccggagttcatggacctgatggccgggctgggcgcgaagatcgaactctccgatacgaaggctgcctgatgagctcgaattcccgatcgttcaaacatttggcaataaagtttcttaagattgaatcctgttgccggtcttgcgatgattatcatataatttctgttgaattacgttaagcatgtaataattaacatgtaatgcatgacgttatttatgagatgggtttttatgattagagtcccgcaattatacatttaatacgcgatagaaaacaaaatatagcgcgcaaactaggataaattatcgcgcgcggtgtcatctatgttactagatcggggatgggggatccactagtgatatccgtcgactggtacctacgcgtagctagcccgtgaagtttctcatctaagcccccatttggacgtgaatgtagacacgtcgaaataaagatttccgaattagaataatttgtttattgctttcgcctataaatacgacggatcgtaatttgtcgttttatcaaaatgtactttcattttataataacgctgcggacatctacatttttgaattgaaaaaaaattggtaattactctttctttttctccatattgaccatcatactcattgctgatccatgtagatttcccggacatgaagccatttacaattgaatatatcctgccgccgctgccgctttgcacccggtggagcttgcatgttggtttctacgcagaactgagccggttaggcagataatttccattgagaactgagccatgtgcaccttccccccaacacggtgagcgacggggcaacggagtgatccacatgggacttttcctagcttggctgccatttttggggtgaggccgttcgcggccgaggggcgcagcccctggggggatgggaggcccgcgttagcgggccgggagggttcgagaagggggggcaccccccttcggcgtgcgcggtcacgcgcacagggcgcagccctggttaaaaacaaggtttataaatattggtttaaaagcaggttaaaagacaggttagcggtggccgaaaaacgggcggaaacccttgcaaatgctggattttctgcctgtggacagcccctcaaatgtcaataggtgcgcccctcatctgtcagcactctgcccctcaagtgtcaaggatcgcgcccctcatctgtcagtagtcgcgcccctcaagtgtcaataccgcagggcacttatccccaggcttgtccacatcatctgtgggaaactcgcgtaaaatcaggcgttttcgccgatttgcgaggctggccagctccacgtcgccggccgaaatcgagcctgcccctcatctgtcaacgccgcgccgggtgagtcggcccctcaagtgtcaacgtccgcccctcatctgtcagtgagggccaagttttccgcgaggtatccacaacgccggcggccggccgcggtgtctcgcacacggcttcgacggcgtttctggcgcgtttgcagggccatagacggccgccagcccagcggcgagggcaaccagcccggtgagcgtcggaaagggtcgatcgaccgatgcccttgagagccttcaacccagtcagctccttccggtgggcgcggggcatgactatcgtcgccgcacttatgactgtcttctttatcatgcaactcgtaggacaggtgccggcagcgctctgggtcattttcggcgaggaccgctttcgctggagcgcgacgatgatcggcctgtcgcttgcggtattcggaatcttgcacgccctcgctcaagccttcgtcactggtcccgccaccaaacgtttcggcgagaagcaggccattatcgccggcatggcggccgacgcgctgggctacgtcttgctggcgttcgcgacgcgaggctggatggccttccccattatgattcttctcgcttccggcggcatcgggatgcccgcgttgcaggccatgctgtccaggcaggtagatgacgaccatcagggacagcttcaaggatcgctcgcggctcttaccagcctaacttcgatcattggaccgctgatcgtcacggcgatttatgccgcctcggcgagcacatggaacgggttggcatggattgtaggcgccgccctataccttgtctgcctccccgcgttgcgtcgcggtgcatggagccgggccacctcgacctgaatggaagccggcggcacctcgctaacggattcaccactccaagaattggagccaatcaattcttgcggagaactgtgaatgcgcaaaccaacccttggcagaacatatccatcgcgtccgccatctccagcagccgcacgcggcgcatctcgggcagcgttgggtcctggccacgggtgcgcatgatcgtgctcctgtcgttgaggacccggctaggctggcggggttgccttactggttagcagaatgaatcaccgatacgcgagcgaacgtgaagcgactgctgctgcaaaacgtctgcgacctgagcaacaacatgaatggtcttcggtttccgtgtttcgtaaagtctggaaacgcggaagtcagcgccctgcaccattatgttccggatctgcatcgcaggatgctgctggctaccctgtggaacacctacatctgtattaacgaagcgctggcattgaccctgagtgatttttctctggtcccgccgcatccataccgccagttgtttaccctcacaacgttccagtaaccgggcatgttcatcatcagtaacccgtatcgtgagcatcctctctcgtttcatcggtatcattacccccatgaacagaaatcccccttacacggaggcatcagtgaccaaacaggaaaaaaccgcccttaacatggcccgctttatcagaagccagacattaacgcttctggagaaactcaacgagctggacgcggatgaacaggcagacatctgtgaatcgcttcacgaccacgctgatgagctttaccgcagctgcctcgcgcgtttcggtgatgacggtgaaaacctctgacacatgcagctcccggagacggtcacagcttgtctgtaagcggatgccgggagcagacaagcccgtcagggcgcgtcagcgggtgttggcgggtgtcggggcgcagccatgacccagtcacgtagcgatagcggagtgtatactggcttaactatgcggcatcagagcagattgtactgagagtgcaccatatgcggtgtgaaataccgcacagatgcgtaaggagaaaataccgcatcaggcgctcttccgcttcctcgctcactgactcgctgcgctcggtcgttcggctgcggcgagcggtatcagctcactcaaaggcggtaatacggttatccacagaatcaggggataacgcaggaaagaacatgtgagcaaaaggccagcaaaaggccaggaaccgtaaaaaggccgcgttgctggcgtttttccataggctccgcccccctgacgagcatcacaaaaatcgacgctcaagtcagaggtggcgaaacccgacaggactataaagataccaggcgtttccccctggaagctccctcgtgcgctctcctgttccgaccctgccgcttaccggatacctgtccgcctttctcccttcgggaagcgtggcgctttctcatagctcacgctgtaggtatctcagttcggtgtaggtcgttcgctccaagctgggctgtgtgcacgaaccccccgttcagcccgaccgctgcgccttatccggtaactatcgtcttgagtccaacccggtaagacacgacttatcgccactggcagcagccactggtaacaggattagcagagcgaggtatgtaggcggtgctacagagttcttgaagtggtggcctaactacggctacactagaaggacagtatttggtatctgcgctctgctgaagccagttaccttcggaaaaagagttggtagctcttgatccggcaaacaaaccaccgctggtagcggtggtttttttgtttgcaagcagcagattacgcgcagaaaaaaaggatctcaagaagatcctttgatcttttctacggggtctgacgctcagtggaacgaaaactcacgttaagggattttggtcatgagattatcaaaaaggatcttcacctagatccttttaaattaaaaatgaagttttaaatcaatctaaagtatatatgagtaaacttggtctgacagttaccaatgcttaatcagtgaggcacctatctcagcgatctgtctatttcgttcatccatagttgcctgactccccgtcgtgtagataactacgatacgggagggcttaccatctggccccagtgctgcaatgataccgcgagacccacgctcaccggctccagatttatcagcaataaaccagccagccggaagggccgagcgcagaagtggtcctgcaactttatccgcctccatccagtctattaattgttgccgggaagctagagtaagtagttcgccagttaatagtttgcgcaacgttgttgccattgctgcaggtcgggagcacaggatgacgcctaacaattcattcaagccgacaccgcttcgcggcgcggcttaattcaggagttaaacatcatgagggaagcggtgatcgccgaagtatcgactcaactatcagaggtagttggcgtcatcgagcgccatctcgaaccgacgttgctggccgtacatttgtacggctccgcagtggatggcggcctgaagccacacagtgatattgatttgctggttacggtgaccgtaaggcttgatgaaacaacgcggcgagctttgatcaacgaccttttggaaacttcggcttcccctggagagagcgagattctccgcgctgtagaagtcaccattgttgtgcacgacgacatcattccgtggcgttatccagctaagcgcgaactgcaatttggagaatggcagcgcaatgacattcttgcaggtatcttcgagccagccacgatcgacattgatctggctatcttgctgacaaaagcaagagaacatagcgttgccttggtaggtccagcggcggaggaactctttgatccggttcctgaacaggatctatttgaggcgctaaatgaaaccttaacgctatggaactcgccgcccgactgggctggcgatgagcgaaatgtagtgcttacgttgtcccgcatttggtacagcgcagtaaccggcaaaatcgcgccgaaggatgtcgctgccgactgggcaatggagcgcctgccggcccagtatcagcccgtcatacttgaagctaggcaggcttatcttggacaagaagatcgcttggcctcgcgcgcagatcagttggaagaatttgttcactacgtgaaaggcgagatcaccaaggtagtcggcaaataatgtctaacaattcgttcaagccgacgccgcttcgcggcgcggcttaactcaagcgttagatgctgcaggcatcgtggtgtcacgctcgtcgtttggtatggcttcattcagctccggttcccaacgatcaaggcgagttacatgatcccccatgttgtgcaaaaaagcggttagctccttcggtcctccgatcgaggatttttcggcgctgcgctacgtccgcgaccgcgttgagggatcaagccacagcagcccactcgaccttctagccgacccagacgagccaagggatctttttggaatgctgctccgtcgtcaggctttccgacgtttgggtggttgaacagaagtcattatcgcacggaatgccaagcactcccgaggggaaccctgtggttggcatgcacatacaaatggacgaacggataaaccttttcacgcccttttaaatatccgattattctaataaacgctcttttctcttaggtttacccgccaatatatcctgtcaaacactgatagtttaaactgaaggcgggaaacgacaatctgg

SEQ ID NO: 2203 - DNA, 11375 bp, artificial
  Synthetic construct pMON92705
gtgaagtttctcatctaagcccccatttggacgtgaatgtagacacgtcgaaataaagatttccgaattagaataatttgtttattgctttcgcctataaatacgacggatcgtaatttgtcgttttatcaaaatgtactttcattttataataacgctgcggacatctacatttttgaattgaaaaaaaattggtaattactctttctttttctccatattgaccatcatactcattgctgatccatgtagatttcccggacatgaagccatttacaattgaatatatcctgccgccgctgccgctttgcacccggtggagcttgcatgttggtttctacgcagaactgagccggttaggcagataatttccattgagaactgagccatgtgcaccttccccccaacacggtgagcgacggggcaacggagtgatccacatgggacttttcctagcttggctgccatttttggggtgaggccgttcgcggccgaggggcgcagcccctggggggatgggaggcccgcgttagcgggccgggagggttcgagaagggggggcaccccccttcggcgtgcgcggtcacgcgcacagggcgcagccctggttaaaaacaaggtttataaatattggtttaaaagcaggttaaaagacaggttagcggtggccgaaaaacgggcggaaacccttgcaaatgctggattttctgcctgtggacagcccctcaaatgtcaataggtgcgcccctcatctgtcagcactctgcccctcaagtgtcaaggatcgcgcccctcatctgtcagtagtcgcgcccctcaagtgtcaataccgcagggcacttatccccaggcttgtccacatcatctgtgggaaactcgcgtaaaatcaggcgttttcgccgatttgcgaggctggccagctccacgtcgccggccgaaatcgagcctgcccctcatctgtcaacgccgcgccgggtgagtcggcccctcaagtgtcaacgtccgcccctcatctgtcagtgagggccaagttttccgcgaggtatccacaacgccggcggccggccgcggtgtctcgcacacggcttcgacggcgtttctggcgcgtttgcagggccatagacggccgccagcccagcggcgagggcaaccagcccggtgagcgtcggaaagggtcgatcgaccgatgcccttgagagccttcaacccagtcagctccttccggtgggcgcggggcatgactatcgtcgccgcacttatgactgtcttctttatcatgcaactcgtaggacaggtgccggcagcgctctgggtcattttcggcgaggaccgctttcgctggagcgcgacgatgatcggcctgtcgcttgcggtattcggaatcttgcacgccctcgctcaagccttcgtcactggtcccgccaccaaacgtttcggcgagaagcaggccattatcgccggcatggcggccgacgcgctgggctacgtcttgctggcgttcgcgacgcgaggctggatggccttccccattatgattcttctcgcttccggcggcatcgggatgcccgcgttgcaggccatgctgtccaggcaggtagatgacgaccatcagggacagcttcaaggatcgctcgcggctcttaccagcctaacttcgatcattggaccgctgatcgtcacggcgatttatgccgcctcggcgagcacatggaacgggttggcatggattgtaggcgccgccctataccttgtctgcctccccgcgttgcgtcgcggtgcatggagccgggccacctcgacctgaatggaagccggcggcacctcgctaacggattcaccactccaagaattggagccaatcaattcttgcggagaactgtgaatgcgcaaaccaacccttggcagaacatatccatcgcgtccgccatctccagcagccgcacgcggcgcatctcgggcagcgttgggtcctggccacgggtgcgcatgatcgtgctcctgtcgttgaggacccggctaggctggcggggttgccttactggttagcagaatgaatcaccgatacgcgagcgaacgtgaagcgactgctgctgcaaaacgtctgcgacctgagcaacaacatgaatggtcttcggtttccgtgtttcgtaaagtctggaaacgcggaagtcagcgccctgcaccattatgttccggatctgcatcgcaggatgctgctggctaccctgtggaacacctacatctgtattaacgaagcgctggcattgaccctgagtgatttttctctggtcccgccgcatccataccgccagttgtttaccctcacaacgttccagtaaccgggcatgttcatcatcagtaacccgtatcgtgagcatcctctctcgtttcatcggtatcattacccccatgaacagaaatcccccttacacggaggcatcagtgaccaaacaggaaaaaaccgcccttaacatggcccgctttatcagaagccagacattaacgcttctggagaaactcaacgagctggacgcggatgaacaggcagacatctgtgaatcgcttcacgaccacgctgatgagctttaccgcagctgcctcgcgcgtttcggtgatgacggtgaaaacctctgacacatgcagctcccggagacggtcacagcttgtctgtaagcggatgccgggagcagacaagcccgtcagggcgcgtcagcgggtgttggcgggtgtcggggcgcagccatgacccagtcacgtagcgatagcggagtgtatactggcttaactatgcggcatcagagcagattgtactgagagtgcaccatatgcggtgtgaaataccgcacagatgcgtaaggagaaaataccgcatcaggcgctcttccgcttcctcgctcactgactcgctgcgctcggtcgttcggctgcggcgagcggtatcagctcactcaaaggcggtaatacggttatccacagaatcaggggataacgcaggaaagaacatgtgagcaaaaggccagcaaaaggccaggaaccgtaaaaaggccgcgttgctggcgtttttccataggctccgcccccctgacgagcatcacaaaaatcgacgctcaagtcagaggtggcgaaacccgacaggactataaagataccaggcgtttccccctggaagctccctcgtgcgctctcctgttccgaccctgccgcttaccggatacctgtccgcctttctcccttcgggaagcgtggcgctttctcatagctcacgctgtaggtatctcagttcggtgtaggtcgttcgctccaagctgggctgtgtgcacgaaccccccgttcagcccgaccgctgcgccttatccggtaactatcgtcttgagtccaacccggtaagacacgacttatcgccactggcagcagccactggtaacaggattagcagagcgaggtatgtaggcggtgctacagagttcttgaagtggtggcctaactacggctacactagaaggacagtatttggtatctgcgctctgctgaagccagttaccttcggaaaaagagttggtagctcttgatccggcaaacaaaccaccgctggtagcggtggtttttttgtttgcaagcagcagattacgcgcagaaaaaaaggatctcaagaagatcctttgatcttttctacggggtctgacgctcagtggaacgaaaactcacgttaagggattttggtcatgagattatcaaaaaggatcttcacctagatccttttaaattaaaaatgaagttttaaatcaatctaaagtatatatgagtaaacttggtctgacagttaccaatgcttaatcagtgaggcacctatctcagcgatctgtctatttcgttcatccatagttgcctgactccccgtcgtgtagataactacgatacgggagggcttaccatctggccccagtgctgcaatgataccgcgagacccacgctcaccggctccagatttatcagcaataaaccagccagccggaagggccgagcgcagaagtggtcctgcaactttatccgcctccatccagtctattaattgttgccgggaagctagagtaagtagttcgccagttaatagtttgcgcaacgttgttgccattgctgcaggtcgggagcacaggatgacgcctaacaattcattcaagccgacaccgcttcgcggcgcggcttaattcaggagttaaacatcatgagggaagcggtgatcgccgaagtatcgactcaactatcagaggtagttggcgtcatcgagcgccatctcgaaccgacgttgctggccgtacatttgtacggctccgcagtggatggcggcctgaagccacacagtgatattgatttgctggttacggtgaccgtaaggcttgatgaaacaacgcggcgagctttgatcaacgaccttttggaaacttcggcttcccctggagagagcgagattctccgcgctgtagaagtcaccattgttgtgcacgacgacatcattccgtggcgttatccagctaagcgcgaactgcaatttggagaatggcagcgcaatgacattcttgcaggtatcttcgagccagccacgatcgacattgatctggctatcttgctgacaaaagcaagagaacatagcgttgccttggtaggtccagcggcggaggaactctttgatccggttcctgaacaggatctatttgaggcgctaaatgaaaccttaacgctatggaactcgccgcccgactgggctggcgatgagcgaaatgtagtgcttacgttgtcccgcatttggtacagcgcagtaaccggcaaaatcgcgccgaaggatgtcgctgccgactgggcaatggagcgcctgccggcccagtatcagcccgtcatacttgaagctaggcaggcttatcttggacaagaagatcgcttggcctcgcgcgcagatcagttggaagaatttgttcactacgtgaaaggcgagatcaccaaggtagtcggcaaataatgtctaacaattcgttcaagccgacgccgcttcgcggcgcggcttaactcaagcgttagatgctgcaggcatcgtggtgtcacgctcgtcgtttggtatggcttcattcagctccggttcccaacgatcaaggcgagttacatgatcccccatgttgtgcaaaaaagcggttagctccttcggtcctccgatcgaggatttttcggcgctgcgctacgtccgcgaccgcgttgagggatcaagccacagcagcccactcgaccttctagccgacccagacgagccaagggatctttttggaatgctgctccgtcgtcaggctttccgacgtttgggtggttgaacagaagtcattatcgcacggaatgccaagcactcccgaggggaaccctgtggttggcatgcacatacaaatggacgaacggataaaccttttcacgcccttttaaatatccgattattctaataaacgctcttttctcttaggtttacccgccaatatatcctgtcaaacactgatagtttaaactgaaggcgggaaacgacaatctggcgcgcctgcggccgcctcgaggtcattcatatgcttgagaagagagtcgggatagtccaaaataaaacaaaggtaagattacctggtcaaaagtgaaaacatcagttaaaaggtggtataaagtaaaatatcggtaataaaaggtggcccaaagtgaaatttactcttttctactattataaaaattgaggatgtttttgtcggtactttgatacgtcatttttgtatgaattggtttttaagtttattcgcttttggaaatgcatatctgtatttgagtcgggttttaagttcgtttgcttttgtaaatacagagggatttgtataagaaatatctttaaaaaaacccatatgctaatttgacataatttttgagaaaaatatatattcaggcgaattctcacaatgaacaataataagattaaaatagctttcccccgttgcagcgcatgggtattttttctagtaaaaataaaagataaacttagactcaaaacatttacaaaaacaacccctaaagttcctaaagcccaaagtgctatccacgatccatagcaagcccagcccaacccaacccaacccaacccaccccagtccagccaactggacaatagtctccacacccccccactatcaccgtgagttgtccgcacgcaccgcacgtctcgcagccaaaaaaaaaaaaagaaagaaaaaaaagaaaaagaaaaaacagcaggtgggtccgggtcgtgggggccggaaacgcgaggaggatcgcgagccagcgacgaggccggccctccctccgcttccaaagaaacgccccccatcgccactatatacatacccccccctctcctcccatccccccaaccctaccaccaccaccaccaccacctccacctcctcccccctcgctgccggacgacgagctcctcccccctccccctccgccgccgccgcgccggtaaccaccccgcccctctcctctttctttctccgttttttttttccgtctcggtctcgatctttggccttggtagtttgggtgggcgagaggcggcttcgtgcgcgcccagatcggtgcgcgggaggggcgggatctcgcggctggggctctcgccggcgtggatccggcccggatctcgcggggaatggggctctcggatgtagatctgcgatccgccgttgttgggggagatgatggggggtttaaaatttccgccatgctaaacaagatcaggaagaggggaaaagggcactatggtttatatttttatatatttctgctgcttcgtcaggcttagatgtgctagatctttctttcttctttttgtgggtagaatttgaatccctcagcattgttcatcggtagtttttcttttcatgatttgtgacaaatgcagcctcgtgcggagcttttttgtaggtagaccgcggaccggtcgcgcctcagcagtcgctgtcgttaacccagcggtactcgctgaggcgatcgcgggcccggtaccctgcaatgtgaccctagacttgtccatcttctggattggccaacttaattaatgtatgaaataaaaggatgcacacatagtgacatgctaatcactataatgtgggcatcaaagttgtgtgttatgtgtaattactaattatctgaataagagaaagagatcatccatatttcttatcctaaatgaatgtcacgtgtctttataattctttgatgaaccagatgcattttattaaccaattccatatacatataaatattaatcatatataattaatatcaattgggttagcaaaacaaatctagtctaggtgtgttttgctaattattgggggatagtgcaaaaagaaatctacgttctcaataattcagatagaaaacttaataaagtgagataatttacatagattgcttttatcctttgatatatgtgaaaccatgcatgatataaggaaaatagatagagaaataattttttacatcgttgaatatgtaaacaatttaattcaagaagctaggaatataaatattgaggagtttatgattattattattattttgatgttcaatgaagttttttttaatttcatatgaagtatacaaaaattcttcatagatttttgtttctatgccgtagttatctttaatatatttgtggttgaagaaatttattgctagaaacgaatggattgtcaatttttttttaaagcaaatatatatgaaattatactgtatattattttagtcatgattaaaatgtggccttaattgaatcatctttctcattcattttttcaaaagcatatcaggatgattgatatttatctattttaaaaattaatttaagggttcaaattaaatttaacttaaaagtgtcctaaccgtagttaaaggtttactttaaaaaaatactatgaaaaatctaatcttctatgaatcgacctgcaggatttaaatccatcgttctggggcctaacgggccaagcttactcgaggtcattcatatgcttgagaagagagtcgggatagtccaaaataaaacaaaggtaagattacctggtcaaaagtgaaaacatcagttaaaaggtggtataaagtaaaatatcggtaataaaaggtggcccaaagtgaaatttactcttttctactattataaaaattgaggatgtttttgtcggtactttgatacgtcatttttgtatgaattggtttttaagtttattcgcttttggaaatgcatatctgtatttgagtcgggttttaagttcgtttgcttttgtaaatacagagggatttgtataagaaatatctttagaaaaacccatatgctaatttgacataatttttgagaaaaatatatattcaggcgaattctcacaatgaacaataataagattaaaatagctttcccccgttgcagcgcatgggtattttttctagtaaaaataaaagataaacttagactcaaaacatttacaaaaacaacccctaaagttcctaaagcccaaagtgctatccacgatccatagcaagcccagcccaacccaacccaacccaacccaccccagtccagccaactggacaatagtctccacacccccccactatcaccgtgagttgtccgcacgcaccgcacgtctcgcagccaaaaaaaaaaagaaagaaaaaaaagaaaaagaaaaaacagcaggtgggtccgggtcgtgggggccggaaacgcgaggaggatcgcgagccagcgacgaggccggccctccctccgcttccaaagaaacgccccccatcgccactatatacatacccccccctctcctcccatccccccaaccctaccaccaccaccaccaccacctccacctcctcccccctcgctgccggacgacgagctcctcccccctccccctccgccgccgccgcgccggtaaccaccccgcccctctcctctttctttctccgtttttttttccgtctcggtctcgatctttggccttggtagtttgggtgggcgagaggcggcttcgtgcgcgcccagatcggtgcgcgggaggggcgggatctcgcggctggggctctcgccggcgtggatccggcccggatctcgcggggaatggggctctcggatgtagatctgcgatccgccgttgttgggggagatgatggggggtttaaaatttccgccgtgctaaacaagatcaggaagaggggaaaagggcactatggtttatatttttatatatttctgctgcttcgtcaggcttagatgtgctagatctttctttcttctttttgtgggtagaatttgaatccctcagcattgttcatcggtagtttttcttttcatgatttgtgacaaatgcagcctcgtgcggagcttttttgtaggtagaagtgatcaaccatggcgcaagttagcagaatctgcaatggtgtgcagaacccatctcttatctccaatctctcgaaatccagtcaacgcaaatctcccttatcggtttctctgaagacgcagcagcatccacgagcttatccgatttcgtcgtcgtggggattgaagaagagtgggatgacgttaattggctctgagcttcgtcctcttaaggtcatgtcttctgtttccacggcgtgcatgcttcacggtgcaagcagccggcccgcaaccgcccgcaaatcctctggcctttccggaaccgtccgcattcccggcgacaagtcgatctcccaccggtccttcatgttcggcggtctcgcgagcggtgaaacgcgcatcaccggccttctggaaggcgaggacgtcatcaatacgggcaaggccatgcaggcgatgggcgcccgcatccgtaaggaaggcgacacctggatcatcgatggcgtcggcaatggcggcctcctggcgcctgaggcgccgctcgatttcggcaatgccgccacgggctgccgcctgacgatgggcctcgtcggggtctacgatttcgacagcaccttcatcggcgacgcctcgctcacaaagcgcccgatgggccgcgtgttgaacccgctgcgcgaaatgggcgtgcaggtgaaatcggaagacggtgaccgtcttcccgttaccttgcgcgggccgaagacgccgacgccgatcacctaccgcgtgccgatggcctccgcacaggtgaagtccgccgtgctgctcgccggcctcaacacgcccggcatcacgacggtcatcgagccgatcatgacgcgcgatcatacggaaaagatgctgcagggctttggcgccaaccttaccgtcgagacggatgcggacggcgtgcgcaccatccgcctggaaggccgcggcaagctcaccggccaagtcatcgacgtgccgggcgacccgtcctcgacggccttcccgctggttgcggccctgcttgttccgggctccgacgtcaccatcctcaacgtgctgatgaaccccacccgcaccggcctcatcctgacgctgcaggaaatgggcgccgacatcgaagtcatcaacccgcgccttgccggcggcgaagacgtggcggacctgcgcgttcgctcctccacgctgaagggcgtcacggtgccggaagaccgcgcgccttcgatgatcgacgaatatccgattctcgctgtcgccgccgccttcgcggaaggggcgaccgtgatgaacggtctggaagaactccgcgtcaaggaaagcgaccgcctctcggccgtcgccaatggcctcaagctcaatggcgtggattgcgatgagggcgagacgtcgctcgtcgtgcgtggccgccctgacggcaaggggctcggcaacgcctcgggcgccgccgtcgccacccatctcgatcaccgcatcgccatgagcttcctcgtcatgggcctcgtgtcggaaaaccctgtcacggtggacgatgccacgatgatcgccacgagcttcccggagttcatggacctgatggccgggctgggcgcgaagatcgaactctccgatacgaaggctgcctgatgagctcgaattcccgatcgttcaaacatttggcaataaagtttcttaagattgaatcctgttgccggtcttgcgatgattatcatataatttctgttgaattacgttaagcatgtaataattaacatgtaatgcatgacgttatttatgagatgggtttttatgattagagtcccgcaattatacatttaatacgcgatagaaaacaaaatatagcgcgcaaactaggataaattatcgcgcgcggtgtcatctatgttactagatcggggatgggggatccactagtgatatccgtcgactggtacctacgcgtagctagccc

SEQ ID NO: 2204 - DNA, 9769 bp, artificial
  Synthetic construct pMON82053
ggtccgatgtgagacttttcaacaaagggtaatatccggaaacctcctcggattccattgcccagctatctgtcactttattgtgaagatagtggaaaaggaaggtggctcctacaaatgccatcattgcgataaaggaaaggccatcgttgaagatgcctctgccgacagtggtcccaaagatggacccccacccacgaggagcatcgtggaaaaagaagacgttccaaccacgtcttcaaagcaagtggattgatgtgatggtccgattgagacttttcaacaaagggtaatatccggaaacctcctcggattccattgcccagctatctgtcactttattgtgaagatagtggaaaaggaaggtggctcctacaaatgccatcattgcgataaaggaaaggccatcgttgaagatgcctctgccgacagtggtcccaaagatggacccccacccacgaggagcatcgtggaaaaagaagacgttccaaccacgtcttcaaagcaagtggattgatgtgatatctccactgacgtaagggatgacgcacaatcccactatccttcgcaagacccttcctctatataaggaagttcatttcatttggagaggaccaggtggtaccggcgcgcctcagcagtcgctgtcgttaacccagcggtactcgctgaggcgatcgcgggccctgatcacctgtcgtacagtatttctacatttgatgtgtgatttgtgaagaacatcaaacaaaacaagcactggctttaatatgatgataagtattatggtaattaattaattggcaaaaacaacaatgaagctaaaattttatttattgagccttgcggttaatttcttgtgatgatctttttttttattttctaattatatatagtttcctttgctttgaaatgctaaaggtttgagagagttatgctctttttttcttcctctttcttttttaactttatcatacaaattttgaataaaaatgtgagtacattgagctcatttaaataagcttgatggggatcagattgtcgtttcccgccttcagtttaaactatcagtgtttgacaggatatattggcgggtaaacctaagagaaaagagcgtttattagaataatcggatatttaaaagggcgtgaaaaggtttatccgttcgtccatttgtatgtgcatgccaaccacagggttcccctcgggagtgcttggcattccgtgcgataatgacttctgttcaaccacccaaacgtcggaaagcctgacgacggagcagcattccaaaaagatcccttggctcgtctgggtcggctagaaggtcgagtgggctgctgtggcttgatccctcaacgcggtcgcggacgtagcgcagcgccgaaaaatcctcgatcggaggaccgaaggagctaaccgcttttttgcacaacatgggggatcatgtaactcgccttgatcgttgggaaccggagctgaatgaagccataccaaacgacgagcgtgacaccacgatgcctgcagcatctaacgcttgagttaagccgcgccgcgaagcggcgtcggcttgaacgaattgttagacattatttgccgactaccttggtgatctcgcctttcacgtagtgaacaaattcttccaactgatctgcgcgcgaggccaagcgatcttcttgtccaagataagcctgcctagcttcaagtatgacgggctgatactgggccggcaggcgctccattgcccagtcggcagcgacatccttcggcgcgattttgccggttactgcgctgtaccaaatgcgggacaacgtaagcactacatttcgctcatcgccagcccagtcgggcggcgagttccatagcgttaaggtttcatttagcgcctcaaatagatcctgttcaggaaccggatcaaagagttcctccgccgctggacctaccaaggcaacgctatgttctcttgcttttgtcagcaagatagccagatcaatgtcgatcgtggctggctcgaagatacctgcaagaatgtcattgcgctgccattctccaaattgcagttcgcgcttagctggataacgccacggaatgatgtcgtcgtgcacaacaatggtgacttctacagcgcggagaatctcgctctctccaggggaagccgaagtttccaaaaggtcgttgatcaaagctcgccgcgttgtttcatcaagccttacggtcaccgtaaccagcaaatcaatatcactgtgtggcttcaggccgccatccactgcggagccgtacaaatgtacggccagcaacgtcggttcgagatggcgctcgatgacgccaactacctctgatagttgagtcgatacttcggcgatcaccgcttccctcatgatgtttaactcctgaattaagccgcgccgcgaagcggtgtcggcttgaatgaattgttaggcgtcatcctgtgctcccgacctgcagcaatggcaacaacgttgcgcaaactattaactggcgaactacttactctagcttcccggcaacaattaatagactggatggaggcggataaagttgcaggaccacttctgcgctcggcccttccggctggctggtttattgctgataaatctggagccggtgagcgtgggtctcgcggtatcattgcagcactggggccagatggtaagccctcccgtatcgtagttatctacacgacggggagtcaggcaactatggatgaacgaaatagacagatcgctgagataggtgcctcactgattaagcattggtaactgtcagaccaagtttactcatatatactttagattgatttaaaacttcatttttaatttaaaaggatctaggtgaagatcctttttgataatctcatgaccaaaatcccttaacgtgagttttcgttccactgagcgtcagaccccgtagaaaagatcaaaggatcttcttgagatcctttttttctgcgcgtaatctgctgcttgcaaacaaaaaaaccaccgctaccagcggtggtttgtttgccggatcaagagctaccaactctttttccgaaggtaactggcttcagcagagcgcagataccaaatactgtccttctagtgtagccgtagttaggccaccacttcaagaactctgtagcaccgcctacatacctcgctctgctaatcctgttaccagtggctgctgccagtggcgataagtcgtgtcttaccgggttggactcaagacgatagttaccggataaggcgcagcggtcgggctgaacggggggttcgtgcacacagcccagcttggagcgaacgacctacaccgaactgagatacctacagcgtgagctatgagaaagcgccacgcttcccgaagggagaaaggcggacaggtatccggtaagcggcagggtcggaacaggagagcgcacgagggagcttccagggggaaacgcctggtatctttatagtcctgtcgggtttcgccacctctgacttgagcgtcgatttttgtgatgctcgtcaggggggcggagcctatggaaaaacgccagcaacgcggcctttttacggttcctggccttttgctggccttttgctcacatgttctttcctgcgttatcccctgattctgtggataaccgtattaccgcctttgagtgagctgataccgctcgccgcagccgaacgaccgagcgcagcgagtcagtgagcgaggaagcggaagagcgcctgatgcggtattttctccttacgcatctgtgcggtatttcacaccgcatatggtgcactctcagtacaatctgctctgatgccgcatagttaagccagtatacactccgctatcgctacgtgactgggtcatggctgcgccccgacacccgccaacacccgctgacgcgccctgacgggcttgtctgctcccggcatccgcttacagacaagctgtgaccgtctccgggagctgcatgtgtcagaggttttcaccgtcatcaccgaaacgcgcgaggcagctgcggtaaagctcatcagcgtggtcgtgaagcgattcacagatgtctgcctgttcatccgcgtccagctcgttgagtttctccagaagcgttaatgtctggcttctgataaagcgggccatgttaagggcggttttttcctgtttggtcactgatgcctccgtgtaagggggatttctgttcatgggggtaatgataccgatgaaacgagagaggatgctcacgatacgggttactgatgatgaacatgcccggttactggaacgttgtgagggtaaacaactggcggtatggatgcggcgggaccagagaaaaatcactcagggtcaatgccagcgcttcgttaatacagatgtaggtgttccacagggtagccagcagcatcctgcgatgcagatccggaacataatggtgcagggcgctgacttccgcgtttccagactttacgaaacacggaaaccgaagaccattcatgttgttgctcaggtcgcagacgttttgcagcagcagtcgcttcacgttcgctcgcgtatcggtgattcattctgctaaccagtaaggcaaccccgccagcctagccgggtcctcaacgacaggagcacgatcatgcgcacccgtggccaggacccaacgctgcccgagatgcgccgcgtgcggctgctggagatggcggacgcgatggatatgttctgccaagggttggtttgcgcattcacagttctccgcaagaattgattggctccaattcttggagtggtgaatccgttagcgaggtgccgccggcttccattcaggtcgaggtggcccggctccatgcaccgcgacgcaacgcggggaggcagacaaggtatagggcggcgcctacaatccatgccaacccgttccatgtgctcgccgaggcggcataaatcgccgtgacgatcagcggtccaatgatcgaagttaggctggtaagagccgcgagcgatccttgaagctgtccctgatggtcgtcatctacctgcctggacagcatggcctgcaacgcgggcatcccgatgccgccggaagcgagaagaatcataatggggaaggccatccagcctcgcgtcgcgaacgccagcaagacgtagcccagcgcgtcggccgccatgccggcgataatggcctgcttctcgccgaaacgtttggtggcgggaccagtgacgaaggcttgagcgagggcgtgcaagattccgaataccgcaagcgacaggccgatcatcgtcgcgctccagcgaaagcggtcctcgccgaaaatgacccagagcgctgccggcacctgtcctacgagttgcatgataaagaagacagtcataagtgcggcgacgatagtcatgccccgcgcccaccggaaggagctgactgggttgaaggctctcaagggcatcggtcgatcgaccctttccgacgctcaccgggctggttgccctcgccgctgggctggcggccgtctatggccctgcaaacgcgccagaaacgccgtcgaagccgtgtgcgagacaccgcggccggccgccggcgttgtggatacctcgcggaaaacttggccctcactgacagatgaggggcggacgttgacacttgaggggccgactcacccggcgcggcgttgacagatgaggggcaggctcgatttcggccggcgacgtggagctggccagcctcgcaaatcggcgaaaacgcctgattttacgcgagtttcccacagatgatgtggacaagcctggggataagtgccctgcggtattgacacttgaggggcgcgactactgacagatgaggggcgcgatccttgacacttgaggggcagagtgctgacagatgaggggcgcacctattgacatttgaggggctgtccacaggcagaaaatccagcatttgcaagggtttccgcccgtttttcggccaccgctaacctgtcttttaacctgcttttaaaccaatatttataaaccttgtttttaaccagggctgcgccctgtgcgcgtgaccgcgcacgccgaaggggggtgcccccccttctcgaaccctcccggcccgctaacgcgggcctcccatccccccaggggctgcgcccctcggccgcgaacggcctcaccccaaaaatggcagccaagctaggaaaagtcccatgtggatcactccgttgccccgtcgctcaccgtgttggggggaaggtgcacatggctcagttctcaatggaaattatctgcctaaccggctcagttctgcgtagaaaccaacatgcaagctccaccgggtgcaaagcggcagcggcggcaggatatattcaattgtaaatggcttcatgtccgggaaatctacatggatcagcaatgagtatgatggtcaatatggagaaaaagaaagagtaattaccaattttttttcaattcaaaaatgtagatgtccgcagcgttattataaaatgaaagtacattttgataaaacgacaaattacgatccgtcgtatttataggcgaaagcaataaacaaattattctaattcggaaatctttatttcgacgtgtctacattcacgtccaaatgggggcttagatgagaaacttcacgatcgatgcggccaccactcgagaagcttactagtcaacaattggccaatctttgttctaaattgctaataaacgaccatttccgtcaattctccttggttgcaacagtctacccgtcaaatgtttactaatttataagtgtgaagtttgaattatgaaagacgaaatcgtattaaaaattcacaagaataaacaactccatagattttcaaaaaaacagtcacgagaaaaaaaccacagtccgtttgtctgctcttctagtttttattatttttctattaatagttttttgttatttcgagaataaaatttgaacgatgtccgaaccacaaaagccgagccgataaatcctaagccgagcctaactttagccgtaaccatcagtcacggctcccgggctaattcatttgaaccgaatcataatcaacggtttagatcaaactcaaaacaatctaacggcaacatagacgcgtcggtgagctaaaaagagtgtgaaagccaggtcaccatagcattgtctctcccagattttttatttgggaaataatagaagaaatagaaaaaaataaaagagtgagaaaaatcgtagagctatatattcgcacatgtactcgtttcgctttccttagtgttagctgctgccgctgttgtttctcctccatttctctatctttctctctcgctgcttctcgaatcttctgtatcatcttcttcttcttcaaggtgagtctctagatccgttcgcttgattttgctgctcgttagtcgttattgttgattctctatgccgatttcgctagatctgtttagcatgcgttgtggttttatgagaaaatctttgttttgggggttgcttgttatgtgattcgatccgtgcttgttggatcgatctgagttaattcttaaggtttatgtgttagatctatggagtttgaggattcttctcgcttctgtcgatctctcgctgttatttttgtttttttcagtgaagtgaagttgtttagttcgaaatgacttcgtgtatgctcgattgatctggttttaatcttcgatctgttaggtgttgatgtttacaagtgaattctagtgttttctcgttgagatctgtgaagtttgaacctagttttctcaataatcaacatatgaagcgatgtttgagtttcaataaacgctgctaatcttcgaaactaagttgtgatctgattcgtgtttacttcatgagcttatccaattcatttcggtttcattttactttttttttagtgaaccatggcgcaagttagcagaatctgcaatggtgtgcagaacccatctcttatctccaatctctcgaaatccagtcaacgcaaatctcccttatcggtttctctgaagacgcagcagcatccacgagcttatccgatttcgtcgtcgtggggattgaagaagagtgggatgacgttaattggctctgagcttcgtcctcttaaggtcatgtcttctgtttccacggcgtgcatgcttcatggagcttcatctaggccagctactgccaggaagtctagcgggctcagtggcaccgtgcgcatccctggcgataaaagtatttcacacaggagcttcatgttcggaggacttgctagtggagagacgagaatcactggtttgcttgagggcgaagatgttatcaacaccggtaaggcgatgcaagcaatgggtgccagaatccgaaaagagggcgatacgtggatcatcgacggtgttggtaacggaggattgctcgctcccgaagcgccacttgactttgggaacgcagctacggggtgccgtcttactatgggactggtaggcgtgtatgactttgactctaccttcatcggtgacgcgagcctcactaagagaccaatgggacgagtgctgaatcccctgagggagatgggtgtccaggtgaaatctgaggatggtgatcgtcttccggttactctgcgaggccccaagacccccacgccaatcacgtacagggttccgatggcgtcagcacaggtcaagtcagcggtactcctggcgggcctcaacacacctggaatcacaaccgtgattgaacccatcatgactagagaccacacggagaagatgttgcagggtttcggcgctaatctaacggtcgaaaccgacgccgacggcgtgaggacaatccgcttggagggcagaggtaaactgactggccaagtcatcgatgtgcctggagatccctcgtccacagcgtttcccctcgtagctgcgttgctcgtccctggatctgatgtgacgatcctgaatgtcctcatgaatccaactagaaccggcctcatcctcacattgcaggagatgggtgctgacatcgaggttatcaatcctaggttggcaggtggagaggatgtggccgatctgcgcgtgcgttctagtacactcaaaggcgtgaccgtccctgaggatcgcgctccatccatgatcgacgagtaccccattctcgccgttgctgctgcgtttgccgagggcgcaactgtaatgaacggccttgaggagttgagggttaaggagagtgacaggctgtccgcggtggcgaatggcctgaagctaaacggcgtggactgcgacgaaggtgaaacgtcccttgtagtccgtggtcgcccagacgggaaggggttggggaatgcttcgggagctgctgtggcgacgcaccttgatcatagaatcgccatgtcatttctggtgatgggacttgtctccgagaatccggtgaccgttgacgatgctaccatgatcgccacctcctttcctgagttcatggacctcatggcaggcttgggggccaagatcgagctgtctgatactaaggccgcttgaattcccgatcgttcaaacatttggcaataaagtttcttaagattgaatcctgttgccggtcttgcgatgattatcatataatttctgttgaattacgttaagcatgtaataattaacatgtaatgcatgacgttatttatgagatgggtttttatgattagagtcccgcaattatacatttaatacgcgatagaaaacaaaatatagcgcgcaaactaggataaattatcgcgcgcggtgtcatctatgttactagatcggggatcccacgtgcggaccgcctgcaggccgcgttatcaagctaactgca

SEQ ID NO: 2205 - DNA, 8504 bp, artificial
  Synthetic construct pMON99053
gtaccctcagcagtcgctgtgcgatcgccagcggtactcgctgaggtcgacgtagttagttaattcagctttcgttcgtatcatcggtttcgacaacgttcgtcaagttcaatgcatcagtttcattgcgcacacaccagaatcctactgagtttgagtattatggcattgggaaaactgtttttcttgtaccatttgttgtgcttgtaatttactgtgttttttattcggttttcgctatcgaactgtgaaatggaaatggatggagaagagttaatgaatgatatggtccttttgttcattctcaaattaatattatttgttttttctcttatttgttgtgtgttgaatttgaaattataagagatatgcaaacattttgttttgagtaaaaatgtgtcaaatcgtggcctctaatgaccgaagttaatatgaggagtaaaacacttgtagttgtaccattatgcttattcactaggcaacaaatatattttcagacctagaaaagctgcaaatgttactgaatacaagtatgtcctcttgtgttttagacatttatgaactttcctttatgtaattttccagaatccttgtcagattctaatcattgctttataattatagttatactcatggatttgtagttgagtatgaaaatattttttaatgcattttatgacttgccaattgattgacaacgcggccgccactcgagtggaagctagctttccgatcctacctgtcacttcatcaaaaggacagtagaaaaggaaggtggcacctacaaatgccatcattgcgataaaggaaaggctatcattcaagatgcctctgccgacagtggtcccaaagatggacccccacccacgaggagcatcgtggaaaaagaagacgttccaaccacgtcttcaaagcaagtggattgatgtgatacttccactgacgtaagggatgacgcacaatcccactatccttcgcaagacccttcctctatataaggaagttcatttcatttggagaggacacgctgaaatcaccagtctctctctacaagatcggggatctctagctagacgatcgtttcgcatgattgaacaagatggattgcacgcaggttctccggccgcttgggtggagaggctattcggctatgactgggcacaacagacaatcggctgctctgatgccgccgtgttccggctgtcagcgcaggggcgcccggttctttttgtcaagaccgacctgtccggtgccctgaatgaactgcaggacgaggcagcgcggctatcgtggctggccacgacgggcgttccttgcgcagctgtgctcgacgttgtcactgaagcgggaagggactggctgctattgggcgaagtgccggggcaggatctcctgtcatctcaccttgctcctgccgagaaagtatccatcatggctgatgcaatgcggcggctgcatacgcttgatccggctacctgcccattcgaccaccaagcgaaacatcgcatcgagcgagcacgtactcggatggaagccggtcttgtcgatcaggatgatctggacgaagagcatcaggggctcgcgccagccgaactgttcgccaggctcaaggcgcgcatgcccgacggcgaggatctcgtcgtgacccatggcgatgcctgcttgccgaatatcatggtggaaaatggccgcttttctggattcatcgactgtggccggctgggtgtggcggaccgctatcaggacatagcgttggctacccgtgatattgctgaagagcttggcggcgaatgggctgaccgcttcctcgtgctttacggtatcgccgctcccgattcgcagcgcatcgccttctatcgccttcttgacgagttcttctgagcgggactctggggttcgatccccaattcccgatcgttcaaacatttggcaataaagtttcttaagattgaatcctgttgccggtcttgcgatgattatcatataatttctgttgaattacgttaagcatgtaataattaacatgtaatgcatgacgttatttatgagatgggtttttatgattagagtcccgcaattatacatttaatacgcgatagaaaacaaaatatagcgcgcaaactaggataaattatcgcgcgcggtgtcatctatgttactagatcggggatcgggccactcgagtggtggccgcatcgatcgtgaagtttctcatctaagcccccatttggacgtgaatgtagacacgtcgaaataaagatttccgaattagaataatttgtttattgctttcgcctataaatacgacggatcgtaatttgtcgttttatcaaaatgtactttcattttataataacgctgcggacatctacatttttgaattgaaaaaaaattggtaattactctttctttttctccatattgaccatcatactcattgctgatccatgtagatttcccggacatgaagccatttacaattgaatatatcctgccgccgctgccgctttgcacccggtggagcttgcatgttggtttctacgcagaactgagccggttaggcagataatttccattgagaactgagccatgtgcaccttccccccaacacggtgagcgacggggcaacggagtgatccacatgggacttttcctagcttggctgccatttttggggtgaggccgttcgcggccgaggggcgcagcccctggggggatgggaggcccgcgttagcgggccgggagggttcgagaagggggggcaccccccttcggcgtgcgcggtcacgcgcacagggcgcagccctggttaaaaacaaggtttataaatattggtttaaaagcaggttaaaagacaggttagcggtggccgaaaaacgggcggaaacccttgcaaatgctggattttctgcctgtggacagcccctcaaatgtcaataggtgcgcccctcatctgtcagcactctgcccctcaagtgtcaaggatcgcgcccctcatctgtcagtagtcgcgcccctcaagtgtcaataccgcagggcacttatccccaggcttgtccacatcatctgtgggaaactcgcgtaaaatcaggcgttttcgccgatttgcgaggctggccagctccacgtcgccggccgaaatcgagcctgcccctcatctgtcaacgccgcgccgggtgagtcggcccctcaagtgtcaacgtccgcccctcatctgtcagtgagggccaagttttccgcgaggtatccacaacgccggcggccggccgcggtgtctcgcacacggcttcgacggcgtttctggcgcgtttgcagggccatagacggccgccagcccagcggcgagggcaaccagcccggtgagcgtcggaaagggtcgatcgaccgatgcccttgagagccttcaacccagtcagctccttccggtgggcgcggggcatgactatcgtcgccgcacttatgactgtcttctttatcatgcaactcgtaggacaggtgccggcagcgctctgggtcattttcggcgaggaccgctttcgctggagcgcgacgatgatcggcctgtcgcttgcggtattcggaatcttgcacgccctcgctcaagccttcgtcactggtcccgccaccaaacgtttcggcgagaagcaggccattatcgccggcatggcggccgacgcgctgggctacgtcttgctggcgttcgcgacgcgaggctggatggccttccccattatgattcttctcgcttccggcggcatcgggatgcccgcgttgcaggccatgctgtccaggcaggtagatgacgaccatcagggacagcttcaaggatcgctcgcggctcttaccagcctaacttcgatcattggaccgctgatcgtcacggcgatttatgccgcctcggcgagcacatggaacgggttggcatggattgtaggcgccgccctataccttgtctgcctccccgcgttgcgtcgcggtgcatggagccgggccacctcgacctgaatggaagccggcggcacctcgctaacggattcaccactccaagaattggagccaatcaattcttgcggagaactgtgaatgcgcaaaccaacccttggcagaacatatccatcgcgtccgccatctccagcagccgcacgcggcgcatctcgggcagcgttgggtcctggccacgggtgcgcatgatcgtgctcctgtcgttgaggacccggctaggctggcggggttgccttactggttagcagaatgaatcaccgatacgcgagcgaacgtgaagcgactgctgctgcaaaacgtctgcgacctgagcaacaacatgaatggtcttcggtttccgtgtttcgtaaagtctggaaacgcggaagtcagcgccctgcaccattatgttccggatctgcatcgcaggatgctgctggctaccctgtggaacacctacatctgtattaacgaagcgctggcattgaccctgagtgatttttctctggtcccgccgcatccataccgccagttgtttaccctcacaacgttccagtaaccgggcatgttcatcatcagtaacccgtatcgtgagcatcctctctcgtttcatcggtatcattacccccatgaacagaaatcccccttacacggaggcatcagtgaccaaacaggaaaaaaccgcccttaacatggcccgctttatcagaagccagacattaacgcttctggagaaactcaacgagctggacgcggatgaacaggcagacatctgtgaatcgcttcacgaccacgctgatgagctttaccgcagctgcctcgcgcgtttcggtgatgacggtgaaaacctctgacacatgcagctcccggagacggtcacagcttgtctgtaagcggatgccgggagcagacaagcccgtcagggcgcgtcagcgggtgttggcgggtgtcggggcgcagccatgacccagtcacgtagcgatagcggagtgtatactggcttaactatgcggcatcagagcagattgtactgagagtgcaccatatgcggtgtgaaataccgcacagatgcgtaaggagaaaataccgcatcaggcgctcttccgcttcctcgctcactgactcgctgcgctcggtcgttcggctgcggcgagcggtatcagctcactcaaaggcggtaatacggttatccacagaatcaggggataacgcaggaaagaacatgtgagcaaaaggccagcaaaaggccaggaaccgtaaaaaggccgcgttgctggcgtttttccataggctccgcccccctgacgagcatcacaaaaatcgacgctcaagtcagaggtggcgaaacccgacaggactataaagataccaggcgtttccccctggaagctccctcgtgcgctctcctgttccgaccctgccgcttaccggatacctgtccgcctttctcccttcgggaagcgtggcgctttctcatagctcacgctgtaggtatctcagttcggtgtaggtcgttcgctccaagctgggctgtgtgcacgaaccccccgttcagcccgaccgctgcgccttatccggtaactatcgtcttgagtccaacccggtaagacacgacttatcgccactggcagcagccactggtaacaggattagcagagcgaggtatgtaggcggtgctacagagttcttgaagtggtggcctaactacggctacactagaaggacagtatttggtatctgcgctctgctgaagccagttaccttcggaaaaagagttggtagctcttgatccggcaaacaaaccaccgctggtagcggtggtttttttgtttgcaagcagcagattacgcgcagaaaaaaaggatctcaagaagatcctttgatcttttctacggggtctgacgctcagtggaacgaaaactcacgttaagggattttggtcatgagattatcaaaaaggatcttcacctagatccttttaaattaaaaatgaagttttaaatcaatctaaagtatatatgagtaaacttggtctgacagttaccaatgcttaatcagtgaggcacctatctcagcgatctgtctatttcgttcatccatagttgcctgactccccgtcgtgtagataactacgatacgggagggcttaccatctggccccagtgctgcaatgataccgcgagacccacgctcaccggctccagatttatcagcaataaaccagccagccggaagggccgagcgcagaagtggtcctgcaactttatccgcctccatccagtctattaattgttgccgggaagctagagtaagtagttcgccagttaatagtttgcgcaacgttgttgccattgctgcaggtcgggagcacaggatgacgcctaacaattcattcaagccgacaccgcttcgcggcgcggcttaattcaggagttaaacatcatgagggaagcggtgatcgccgaagtatcgactcaactatcagaggtagttggcgtcatcgagcgccatctcgaaccgacgttgctggccgtacatttgtacggctccgcagtggatggcggcctgaagccacacagtgatattgatttgctggttacggtgaccgtaaggcttgatgaaacaacgcggcgagctttgatcaacgaccttttggaaacttcggcttcccctggagagagcgagattctccgcgctgtagaagtcaccattgttgtgcacgacgacatcattccgtggcgttatccagctaagcgcgaactgcaatttggagaatggcagcgcaatgacattcttgcaggtatcttcgagccagccacgatcgacattgatctggctatcttgctgacaaaagcaagagaacatagcgttgccttggtaggtccagcggcggaggaactctttgatccggttcctgaacaggatctatttgaggcgctaaatgaaaccttaacgctatggaactcgccgcccgactgggctggcgatgagcgaaatgtagtgcttacgttgtcccgcatttggtacagcgcagtaaccggcaaaatcgcgccgaaggatgtcgctgccgactgggcaatggagcgcctgccggcccagtatcagcccgtcatacttgaagctaggcaggcttatcttggacaagaagatcgcttggcctcgcgcgcagatcagttggaagaatttgttcactacgtgaaaggcgagatcaccaaggtagtcggcaaataatgtctaacaattcgttcaagccgacgccgcttcgcggcgcggcttaactcaagcgttagatgctgcaggcatcgtggtgtcacgctcgtcgtttggtatggcttcattcagctccggttcccaacgatcaaggcgagttacatgatcccccatgttgtgcaaaaaagcggttagctccttcggtcctccgatcgaggatttttcggcgctgcgctacgtccgcgaccgcgttgagggatcaagccacagcagcccactcgaccttctagccgacccagacgagccaagggatctttttggaatgctgctccgtcgtcaggctttccgacgtttgggtggttgaacagaagtcattatcgcacggaatgccaagcactcccgaggggaaccctgtggttggcatgcacatacaaatggacgaacggataaaccttttcacgcccttttaaatatccgattattctaataaacgctcttttctcttaggtttacccgccaatatatcctgtcaaacactgatagtttaaactgaaggcgggaaacgacaatctgatccccatcaagcttggccagcttctgcaggtccgattgagacttttcaacaaagggtaatatccggaaacctcctcggattccattgcccagctatctgtcactttattgtgaagatagtggaaaaggaaggtggctcctacaaatgccatcattgcgataaaggaaaggccatcgttgaagatgcctctgccgacagtggtcccaaagatggacccccacccacgaggagcatcgtggaaaaagaagacgttccaaccacgtcttcaaagcaagtggattgatgtgatggtccgattgagacttttcaacaaagggtaatatccggaaacctcctcggattccattgcccagctatctgtcactttattgtgaagatagtggaaaaggaaggtggctcctacaaatgccatcattgcgataaaggaaaggccatcgttgaagatgcctctgccgacagtggtcccaaagatggacccccacccacgaggagcatcgtggaaaaagaagacgttccaaccacgtcttcaaagcaagtggattgatgtgatatctccactgacgtaagggatgacgcacaatcccactatccttcgcaagacccttcctctatataaggaagttcatttcatttggagaggacacagaaaaatttgctacattgtttcacaaacttcaaatattattcatttatttgtcagctttcaaactctttgtttcttgtttgttgattagatctg
